(19) United States
(12) Patent Application Publication
(10) Pub. No.: US 2022/0243215 A1
(43) Pub. Date: Aug. 4, 2022

(54) TERPENE PRODUCTION IN PLANTS

(71) Applicants: ALTRIA CLIENT SERVICES LLC, Richmond, VA (US); UNIVERSITY OF VIRGINIA PATENT FOUNDATION, Charlottesville, VA (US)

(72) Inventors: Chengalrayan KUDITHIPUDI, Midlothian, VA (US); Yanxin SHEN, Henrico, VA (US); Dongmei XU, Glen Allen, VA (US); Michael Paul TIMKO, Charlottesville, VA (US); Roel RABARA, Charlottesville, VA (US)

(21) Appl. No.: 17/591,033

(22) Filed: Feb. 2, 2022

Related U.S. Application Data
(60) Provisional application No. 63/145,259, filed on Feb. 3, 2021.
(60) Provisional application No. 63/145,262, filed on Feb. 3, 2021.
(60) Provisional application No. 63/145,263, filed on Feb. 3, 2021.

(51) Int. Cl. C12N 15/82; C07K 14/415; C12P 5/00

(52) U.S. Cl. CPC C12N 15/8243; C12P 5/007; C12N 15/8223; C07K 14/415

(57) ABSTRACT

Composition and methods for the modification of the secondary metabolic functions of glandular trichomes in plants, such as tobacco or Cannabis, that control the formation of terpenes that impart specific flavor and aroma characteristics to the plant leaves are provided. Enhanced terpene production and composition are achieved through targeted modification in the biochemical synthesis pathways for menthol and cis-abienol. This application provides novel nucleotide sequences encoding the enzymology for production of these terpenes in tobacco and Cannabis application to their use plants.

### CROSS-REFERENCE TO RELATED APPLICATIONS AND INCORPORATION OF SEQUENCE LISTING

[0001] This application claims the benefit of U.S. Provisional Patent Application No. 63/145,259, filed Feb. 3, 2021; U.S. Provisional Patent Application No. 63/145,262, filed Feb. 3, 2021; and U.S. Provisional Patent Application No. 63/145,263, filed Feb. 3, 2021, all of which are incorporated by reference herein in their entireties. This application also contains a Sequence Listing, which has been submitted electronically in ASCII format and is hereby incorporated by reference in its entirety. Said ASCII copy, created on Jan. 25, 2022, is named P34829US01_SL.txt and is 743,305 bytes in size as measured in Microsoft Windows®.

### FIELD

[0002] The present disclosure relates to terpenoid biosynthesis genes and genetic manipulation thereof in plants, including tobacco and Cannabis.

### Sequences

[0003] Table 1 provides nucleic acid sequences and amino acid sequences used in this disclosure.

TABLE 1
Sequences used in this disclosure.

| SEQ | | Annotation | |
|---|---|---|---|
| ID NO | Gene ID | (NT3.1/NCBI) | Sequence Type |
| 1 | g49326 | Geranylgeranyl diphosphate synthase/diphosphate synthase | Nucleic acid, coding |
| | | (GGPPS2)GQ911584 nucleotide coding sequence | |
| 2 | g49765 | Geranylgeranyl pyrophosphate synthase/geranyl diphosphate synthase | Nucleic acid, coding |
| | | nucleotide coding sequence | |
| 3 | g20844 | Copal-8-ol diphosphate hydratase, chloroplastic/Nicotiana tabacum cps2 | Nucleic acid, coding |
| | | gene for 8-hydroxy-copalyl diphosphate synthase nucleotide coding | |
| | | sequence | |
| 4 | g2330 | Cis-abienol synthase, chloroplastic/(cis-abienol synthase/ABS) Isoform 1 | Nucleic acid, coding |
| | | (NtaABS) nucleotide coding sequence | |
| 5 | g2330 | Cis-abienol synthase, chloroplastic/(cis-abienol synthase/ABS) Isoform 2 | Nucleic acid, coding |
| | | (NtLIBS) nucleotide coding sequence | |
| 6 | g59058 | Ent-kaurene synthase/Nicotiana tabacum cis-abienol synthase, | Nucleic acid, coding |
| | | chloroplastic-like (LOC107805659), transcript variant X1, mRNA | |
| 7 | g20765 | Geranyl diphosphate synthase | Nucleic acid, coding |
| 8 | g29598 | (−)-camphenetricyclene synthase, chloroplastic/(−)-limonene synthase (LS) | Nucleic acid, coding |
| 9 | g15165 | Terpene synthase/limonene synthase X1_citrus_sinensis | Nucleic acid, coding |
| 10 | g47974 | Cytochrome P450/(−)-limonene-3-hydroxylase | Nucleic acid, coding |
| 11 | g19518 | Cytochrome P450/limonene-3-hydroxylase_mentha_spicata | Nucleic acid, coding |
| 12 | g28322 | Cytochrome P450/limonene-3-hydroxylase_mentha_spicata | Nucleic acid, coding |
| 13 | g18898 | Short-chain dehydrogenase reductase 4/ | Nucleic acid, coding |
| | | isopiperitenol_dehydrogenase_mentha | |
| 14 | g7706 | NADP-dependent dehydrogenase/pulegone_reductase_tobacco | Nucleic acid, coding |
| 15 | g29837 | (+)-neomenthol dehydrogenase/menthone_reductase_capsicum | Nucleic acid, coding |
| 16 | g96188 | Cytochrome P450/menthofuran synthase | Nucleic acid, coding |
| 17 | g58533 | Cembratrienol synthase 2a/ | Nucleic acid, coding |
| | | Nicotiana sylvestris cembratrienol synthase 2a mRNA, complete cds | |
| 18 | g33184 | Copalyl diphosphate synthase/Levopimaradiene synthetase asparagus | Nucleic acid, coding |
| 19 | g36718 | 2-isopropylmalate synthase 2/2-isopropylmalate synthetase arabidopsis | Nucleic acid, coding |
| 20 | g50844 | 2-oxoisovalerate dehydrogenase subunit alpha/ | Nucleic acid, coding |
| | | 2-oxoisovalerate dehydrogenase subunit alpha | |
| 21 | g63865 | 2-oxoisovalerate dehydrogenase subunit alpha/ | Nucleic acid, coding |
| | | 2-oxoisovalerate dehydrogenase subunit alpha | |
| 22 | g49326 | Geranylgeranyl diphosphate synthase/diphosphate synthase (GGPPS2) | Nucleic acid, |
| | | GQ911584 | genomic |
| 23 | g49765 | Geranylgeranyl pyrophosphate synthase/geranyl diphosphate synthase | Nucleic acid, |
| | | | genomic |
| 24 | g20844 | Copal-8-ol diphosphate hydratase,chloroplastic/Nicotiana tabacum cps2 | Nucleic acid, |
| | | gene for 8-hydroxy-copalyl diphosphate synthase | genomic |
| 25 | g2330 | Cis-abienol synthase, chloroplastic/(cis-abienol synthase/ABS) Isoform 1 | Nucleic acid, |
| | | (NtaABS) | genomic |
| 26 | g2330 | Cis-abienol synthase, chloroplastic/(cis-abienol synthase/ABS) Isoform 2 | Nucleic acid, |
| | | (NtABS) | genomic |
| 27 | g59058 | Ent-kaurene synthase/Nicotiana tabacum cis-abienol synthase, | Nucleic acid, |
| | | chloroplastic-like (LOC107805659), transcript variant X1, mRNA | genomic |
| 28 | g20765 | Geranyl diphosphate synthase | Nucleic acid, |
| | | | genomic |
| 29 | g29598 | (−)-camphenetricyclene synthase, chloroplastic/(−)-limonene synthase (LS) | Nucleic acid, |
| | | | genomic |
| 30 | g15165 | Terpene synthase/limonene synthase_X1_citrus_sinensis | Nucleic acid, |
| | | | genomic |
| 31 | g47974 | Cytochrome P450/(−)-limonene-3-hydroxylase | Nucleic acid, |
| | | | genomic |
| 32 | g19518 | Cytochrome P450/limonene-3-hydroxylase_mentha_spicata | Nucleic acid, |
| | | | genomic |
| 33 | g28322 | Cytochrome P450/limonene-3-hydroxylase_mentha_spicata | Nucleic acid, |
| | | | genomic |
| 34 | g18898 | Short-chain dehydrogenase reductase 4/ | Nucleic acid, |
| | | isopiperitenol_dehydrogenase_mentha | genomic |
| 35 | g7706 | NADP-dependent dehydrogenase/pulegone_reductase_tobacco | Nucleic acid, |
| | | | genomic |
| 36 | g29837 | (+)-neomenthol dehydrogenase/menthone_reductase_capsicum | Nucleic acid, |
| | | | genomic |
| 37 | g96188 | Cytochrome P450/menthofuran synthase | Nucleic acid, |
| | | | genomic |
| 38 | g58533 | Cembratrienol synthase 2a/ | Nucleic acid, |
| | | Nicotiana sylvestris cembratrienol synthase 2a mRNA, complete cds | genomic |
| 39 | g33184 | Copalyl diphosphate synthase/Levopimaradiene_synthetase_asparagus | Nucleic acid, |
| | | | genomic |
| 40 | g36718 | 2-isopropylmalate synthase 2/ | Nucleic acid, |
| | | 2-isopropylmalate synthetase_arabidopsis | genomic |
| 41 | g50844 | 2-oxoisovalerate dehydrogenase subunit alpha/ | Nucleic acid, |
| | | 2-oxoisovalerate dehydrogenase subunit alpha | genomic |
| 42 | g63865 | 2-oxoisovalerate dehydrogenase subunit alpha/ | Nucleic acid, |
| | | 2-oxoisovalerate dehydrogenase subunit alpha | genomic |
| 43 | g49326 | Geranylgeranyl diphosphate synthase/diphosphate synthase | Amino acid |
| | | (GGPPS2)GQ911584 | |
| 44 | g49765 | Geranylgeranyl pyrophosphate synthase/geranyl diphosphate synthase | Amino acid |
| 45 | g20844 | Copal-8-ol diphosphate hydratase,chloroplastic/Nicotiana tabacum cps2 | Amino acid |
| | | gene for 8-hydroxy-copalyl diphosphate synthase | |
| 46 | g2330 | Cis-abienol synthase, chloroplastic/(cis-abienol synthase/ABS) Isoform 1 | Amino acid |
| 47 | g2330 | Cis-abienol synthase, chloroplastic/(cis-abienol synthase/ABS) Isoform 2 | Amino acid |
| 48 | g59058 | Ent-kaurene synthase/Nicotiana tabacum cis-abienol synthase, | Amino acid |
| | | chloroplastic-like (LOC107805659), transcript variant X1, mRNA | |
| 49 | g20765 | Geranyl diphosphate synthase | Amino acid |
| 50 | g29598 | (−)-camphenetricyclene synthase, chloroplastic/(−)-limonene synthase (LS) | Amino acid |
| 51 | g15165 | Terpene synthase/limonene synthase_X1_citrus_sinensis | Amino acid |
| 52 | g47974 | Cytochrome P450/(−)-limonene-3-hydroxylase | Amino acid |
| 53 | g19518 | Cytochrome P450/limonene-3-hydroxylase mentha_spicata | Amino acid |
| 54 | g28322 | Cytochrome P450/limonene-3-hydroxylase mentha_spicata | Amino acid |
| 55 | g18898 | Short-chain dehydrogenase reductase 4/ | Amino acid |
| | | isopiperitenol dehydrogenase mentha | |
| 56 | g7706 | NADP-dependent dehydrogenase/pulegone_reductase_tobacco | Amino acid |
| 57 | g29837 | (+)-neomenthol dehydrogenase/menthone_reductase_capsicum | Amino acid |
| 58 | g96188 | Cytochrome P450/menthofuran synthase | Amino acid |
| 59 | g58533 | Cembratrienol synthase 2a/ | Amino acid |
| | | Nicotiana sylvestris cembratrienol synthase 2a mRNA, complete cds | |
| 60 | g33184 | Copalyl diphosphate synthase/Levopimaradiene_synthetase_asparagus | Amino acid |
| 61 | g36718 | 2-isopropylmalate synthase 2/ | Amino acid |
| | | 2-isopropylmalate synthetase_arabidopsis | |
| 62 | g50844 | 2-oxoisovalerate dehydrogenase subunit alpha/ | Amino acid |
| | | 2-oxoisovalerate dehydrogenase subunit alpha | |
| 63 | g63865 | 2-oxoisovalerate dehydrogenase subunit alpha/ | Amino acid |
| | | 2-oxoisovalerate dehydrogenase subunit alpha | |
| 64 | g49765 - | Geranylgeranyl pyrophosphate synthase/geranyl diphosphate synthase | Nucleic acid |
| | FWD | forward primer | |
| | primer | | |
| 65 | g49765 - | Geranylgeranyl pyrophosphate synthase/geranyl diphosphate synthase | Nucleic acid |
| | REV | reverse primer | |
| | primer | | |
| 66 | g29598 - | (−)-camphenetricyclene synthase, chloroplastic/(−)-limonene synthase (LS) | Nucleic acid |
| | FWD | forward primer | |
| | primer | | |
| 67 | g29598 - | (−)-camphenetricyclene synthase, chloroplastic/(−)-limonene synthase (LS) | Nucleic acid |
| | REV | reverse primer | |
| | primer | | |
| 68 | g2330 - | Cis-abienol synthase, chloroplastic/(cis-abienol synthase/ABS) | Nucleic acid |
| | FWD | forward primer | |
| | primer | | |
| 69 | g2330 - | Cis-abienol synthase, chloroplastic/(cis-abienol synthase/ABS) | Nucleic acid |
| | REV | reverse primer | |
| | primer | | |
| 70 | g47974 - | Cytochrome P450/(−)-limonene-3-hydroxylase forward primer | Nucleic acid |
| | FWD | | |
| | primer | | |
| 71 | g47974 - | Cytochrome P450/(−)-limonene-3-hydroxylase reverse primer | Nucleic acid |
| | REV | | |
| | primer | | |
| 72 | g96188 - | Cytochrome P450/menthofuransynthase forward primer | Nucleic acid |
| | FWD | | |
| | primer | | |
| 73 | g96188 - | Cytochrome P450/menthofuran synthase reverse primer | Nucleic acid |
| | REV | | |
| | primer | | |
| 74 | g20844 - | Copal-8-ol diphosphate hydratase, chloroplastic/Nicotiana tabacum cps2 | Nucleic acid |
| | FWD | gene for 8-hydroxy-copalyl diphosphate synthase forward primer | |
| | primer | | |
| 75 | g20844 - | Copal-8-ol diphosphate hydratase, chloroplastic/Nicotiana tabacum cps2 | Nucleic acid |
| | REV | gene for 8-hydroxy-copalyl diphosphate synthase reverse primer | |
| | primer | | |
| 76 | g36718 - | 2-isopropylmalate synthase 2/ | Nucleic acid |
| | FWD | 2-isopropylmalate synthetase_arabidopsis forward primer | |
| | primer | | |
| 77 | g36718 - | 2-isopropylmalate synthase 2/ | Nucleic acid |
| | REV | 2-isopropylmalate synthetase_arabidopsis reverse primer | |
| | primer | | |
| 78 | g50844 - | 2-oxoisovalerate dehydrogenase subunit alpha/ | Nucleic acid |
| | FWD | 2-oxoisovalerate dehydrogenase subunit alpha forward primer | |
| | primer | | |
| 79 | g50844 - | 2-oxoisovalerate dehydrogenase subunit alpha/ | Nucleic acid |
| | REV | 2-oxoisovalerate dehydrogenase subunit alpha reverse primer | |
| | primer | | |
| 80 | g20765 - | Geranyl diphosphate synthase forward primer | Nucleic acid |
| | FWD | | |
| | primer | | |
| 81 | g20765 - | Geranyl diphosphate synthase reverse primer | Nucleic acid |
| | REV | | |
| | primer | | |
| 82 | g18898 - | Short-chain dehydrogenase reductase 4/ | Nucleic acid |
| | FWD | isopiperitenol_dehydrogenase_mentha forward primer | |
| | primer | | |
| 83 | g18898 - | Short-chain dehydrogenase reductase 4/ | Nucleic acid |
| | REV | isopiperitenol_dehydrogenase_mentha reverse primer | |
| | primer | | |
| 84 | g33184 - | Copalyl diphosphate synthase/Levopimaradiene_synthetase_asparagus | Nucleic acid |
| | FWD | forward primer | |
| | primer | | |
| 85 | g33184 - | Copalyl diphosphate synthase/Levopimaradiene_synthetase_asparagus | Nucleic acid |
| | REV | reverse primer | |
| | primer | | |
| 86 | g15165 - | Terpene synthase/limonene_synthase_X1_citrus_sinensis forward primer | Nucleic acid |
| | FWD | | |
| | primer | | |
| 87 | g15165 - | Terpene synthase/limonene_synthase_X1_citrus_sinensis reverse primer | Nucleic acid |
| | REV | | |
| | primer | | |
| 88 | g19518 - | Cytochrome P450/limonene-3-hydroxylase_mentha_spicata | Nucleic acid |
| | FWD | primer | |
| | primer | | |
| 89 | g19518 - | Cytochrome P450/limonene-3-hydroxylase_mentha_spicata reverse primer | Nucleic acid |
| | REV | | |
| | primer | | |
| 90 | g29837 - | (+)-neomenthol dehydrogenase/menthone_reductase_capsicum forward | Nucleic acid |
| | FWD | primer | |
| | primer | | |
| 91 | g29837 - | (+)-neomenthol dehydrogenase/menthone_reductase_capsicum reverse | Nucleic acid |
| | REV | primer | |
| | primer | | |
| 92 | g7706 - | NADP-dependent dehydrogenase/pulegone_reductase_tobacco forward | Nucleic acid |
| | FWD | primer | |
| | primer | | |
| 93 | g7706 - | NADP-dependent dehydrogenase/pulegone_reductase_tobacco reverse | Nucleic acid |
| | REV | primer | |
| | primer | | |
| 94 | g63865 - | 2-oxoisovalerate dehydrogenase subunit alpha/ | Nucleic acid |
| | FWD | 2-oxoisovalerate dehydrogenase subunit alpha forward primer | |
| | primer | | |
| 95 | g63865 - | 2-oxoisovalerate dehydrogenase subunit alpha/ | Nucleic acid |
| | REV | 2-oxoisovalerate dehydrogenase subunit alpha reverse primer | |
| | primer | | |
| 96 | g28322 - | Cytochrome P450/limonene-3-hydroxylase_mentha_spicata forward | Nucleic acid |
| | FWD | primer | |
| | primer | | |
| 97 | g28322 - | Cytochrome P450/limonene-3-hydroxylase_mentha_spicata reverse primer | Nucleic acid |
| | REV | | |
| | primer | | |
| 98 | g59058 - | Ent-kaurene synthase/Nicotiana tabacum cis-abienol synthase, | Nucleic acid |
| | FWD | chloroplastic-like (LOC107805659), transcript variant X1 forward primer | |
| | primer | | |
| 99 | g59058 - | Ent-kaurene synthase/Nicotiana tabacum cis-abienol synthase, | Nucleic acid |
| | REV | chloroplastic-like (LOC107805659), transcript variant X1 reverse primer | |
| | primer | | |
| 100 | g49326 - | Geranylgeranyl diphosphate synthase/diphosphate synthase | Nucleic acid |
| | FWD | (GGPPS2)GQ911584 forward primer | |
| | primer | | |
| 101 | g49326 - | Geranylgeranyl diphosphate synthase/diphosphate synthase | Nucleic acid |
| | REV | (GGPPS2)GQ911584 reverse primer | |
| | primer | | |
| 102 | g58533 - | Cembratrienol synthase 2a/ | Nucleic acid |
| | FWD | Nicotiana sylvestris cembratrienol synthase 2a forward primer | |
| | primer | | |
| 103 | g58533 - | Cembratrienol synthase 2a/ | |
| | REV | Nicotiana sylvestris cembratrienol synthase 2a reverse primer | Nucleic acid |
| | primer | | |
| 104 | | RbcsT promoter | Nucleic acid |
| | | (1243 nt) | |
| 105 | | RbcsT promoter (436 nt) | Nucleic acid |
| 106 | | NtPSO 1.5 kb promoter | Nucleic acid |
| 107 | | NtPSO 1.0 kb promoter | Nucleic acid |
| 108 | | NtPHY 1.5 kb promoter | Nucleic acid |
| 109 | | NtPHY 0.5 kb promoter | Nucleic acid |
| 110 | | NtCYC 1.5 kb promoter | Nucleic acid |
| 111 | | NtCYC 0.5 kb promoter | Nucleic acid |
| 112 | g29597 | (−)-limonene synthase (LS) | Nucleic acid, coding |
| 113 | g69975 | Geranylgeranyl diphosphate synthase | Nucleic acid, coding |
| 114 | g56096 | Cembratrienol synthase 2a | Nucleic acid, coding |
| 115 | g59063 | 8-hydroxy-copalyl-diphosphate synthase | Nucleic acid, coding |
| 116 | g59492 | 2-isopropylmalate synthetase | Nucleic acid, coding |
| 117 | g76515 | (−)-limonene synthase (LS) | Nucleic acid, coding |
| 118 | g19519 | Limonene-3-hydroxylase | Nucleic acid, coding |
| 119 | g20478 | Cis-abienol synthase | Nucleic acid, coding |
| 120 | g80474 | Menthofuran synthase | Nucleic acid, coding |
| 121 | g27500 | Isopiperitenol dehydrogenase | Nucleic acid, coding |
| 122 | g68795 | Limonene synthase | Nucleic acid, coding |
| 123 | g53620 | (−)-limonene-3-hydroxylase | Nucleic acid, coding |
| 124 | g86048 | 2-isopropylmalate synthetase | Nucleic acid, coding |
| 125 | g59293 | Geranyl diphosphate synthase | Nucleic acid, coding |
| 126 | g 29597 | (−)-limonene synthase(LS), genomic sequence | Nucleic acid, |
| | | | genomic |
| 127 | g 69975 | Geranylgeranyl diphosphate synthase, genomic sequence | Nucleic acid, |
| | | | genomic |
| 128 | g 56096 | Cembratrienolsynthase 2a, genomic sequence | Nucleic acid, |
| | | | genomic |
| 129 | g 59063 | 8-hydroxy-copalyl-diphosphate synthase, genomic sequence | Nucleic acid, |
| | | | genomic |
| 130 | g 59492 | 2-isopropylmalate synthetase, genomic sequence | Nucleic acid, |
| | | | genomic |
| 131 | g 76515 | (−)-limonene synthase (LS), genomic sequence | Nucleic acid, |
| | | | genomic |
| 132 | g 19519 | Limonene-3-hydroxylase, genomic sequence | Nucleic acid, |
| | | | genomic |
| 133 | g 20478 | Cis-abienol synthase, genomic sequence | Nucleic acid, |
| | | | genomic |
| 134 | g 80474 | Menthofuran synthase, genomic sequence | Nucleic acid, |
| | | | genomic |
| 135 | g 27500 | Isopiperitenol dehydrogenase, genomic sequence | Nucleic acid, |
| | | | genomic |
| 136 | g 68795 | Limonene synthase, genomic sequence | Nucleic acid, |
| | | | genomic |
| 137 | g 53620 | (−)-limonene-3-hydroxylase, genomic sequence | Nucleic acid, |
| | | | genomic |
| 138 | g 86048 | 2-isopropylmalate synthetase, genomic sequence | Nucleic acid, |
| | | | genomic |
| 139 | g 59293 | Geranyl diphosphate synthase, genomic sequence | Nucleic acid, |
| | | | genomic |
| 140 | g29597 | (−)-limonene synthase(LS), genomic sequence | Amino acid |
| 141 | g69975 | Geranylgeranyl diphosphate synthase, genomic sequence | Amino acid |
| 142 | g56096 | Cembratrienol synthase 2a, genomic sequence | Amino acid |
| 143 | g59063 | 8-hydroxy-copalyldiphosphate synthase, genomic sequence | Amino acid |
| 144 | g59492 | 2-isopropylmalate synthetase, genomic sequence | Amino acid |
| 145 | g76515 | (−)-limonene synthase(LS) , genomic sequence | Amino acid |
| 146 | g19519 | Limonene-3-hydroxylase, genomic sequence | Amino acid |
| 147 | g20478 | Cis-abienol synthase, genomic sequence | Amino acid |
| 148 | g80474 | Menthofuran synthase, genomic sequence | Amino acid |
| 149 | g27500 | Isopiperitenol dehydrogenase, genomic sequence | Amino acid |
| 150 | g68795 | Limonene synthase, genomic sequence | Amino acid |
| 151 | g53620 | (−)-limonene-3-hydroxylase, genomic sequence | Amino acid |
| 152 | g86048 | 2-isopropylmalate synthetase, genomic sequence | Amino acid |
| 153 | g59293 | Geranyl diphosphate synthase, genomic sequence | Amino acid |
| 154 | pGWB55 | plasmid | Nucleic acid |
| | 1, 12, | | |
| | 723 bp | | |
| 155 | g62191 | Phylloplanin | Nucleic acid, coding |
| 156 | g62191 | Phylloplanin | Nucleic acid, |
| | | | genomic |
| 157 | g62191 | Phylloplanin | Amino acid |
| 158 | g89817 | Cytochrome P450/premnaspirodiene oxygenase (PSO) | Nucleic acid, coding |
| 159 | g89817 | Cytochrome P450/premnaspirodiene oxygenase (PSO) | Nucleic acid, |
| | | | genomic |
| 160 | g89817 | Cytochrome P450/premnaspirodiene oxygenase (PSO) | Amino acid |
| 161 | | geranylgeranyl pyrophosphate synthase chloroplastic [Cannabis sativa] | Nucleic acid, |
| | | | genomic |
| 162 | | (−)-kolavenyl diphosphate synthase TPS28. chloroplastic [Cannabis sativa] | Nucleic acid, |
| | | | genomic |
| 163 | | solanesyl diphosphate synthase 3 chloroplastic/mitochondrial [Cannabis | Nucleic acid, |
| | | sativa] | genomic |
| 164 | | terpene synthase 10-like isoform X1 [Cannabis sativa] | Nucleic acid, |
| | | | genomic |
| 165 | | (−)-limonene synthase chloroplastic isoform X1 [Cannabis sativa] | Nucleic acid, |
| | | | genomic |
| 166 | | cytochrome P450 71D11 (XP_030510234.1) [Cannabis sativa] | Nucleic acid, |
| | | | genomic |
| 167 | | cytochrome P450 71D9 [Cannabis sativa] | Nucleic acid, |
| | | | genomic |
| 168 | | cytochrome P450 71D11 (XP_030502273.1) [Cannabis sativa] | Nucleic acid, |
| | | | genomic |
| 169 | | (−)-isopiperitenol/(−)-carveol dehydrogenase. mitochondrial-like [Cannabis | Nucleic acid, |
| | | sativa] | genomic |
| 170 | | 2-alkenal reductase (NADP(+)-dependent) [Cannabis sativa] | Nucleic acid, |
| | | | genomic |
| 171 | | uncharacterized protein LOC115704491 [Cannabis sativa] | Nucleic acid, |
| | | | genomic |
| 172 | | cytochrome P450 71A22-like [Cannabis sativa] | Nucleic acid, |
| | | | genomic |
| 173 | | (−)-germacrene D synthase-like [Cannabis sativa] | Nucleic acid, |
| | | | genomic |
| 174 | | 2-isopropylmalate synthase 2. chloroplastic [Cannabis sativa] | Nucleic acid, |
| | | | genomic |
| 175 | | transcription factor MYB61 isoform X1 [Cannabis sativa] | Nucleic acid, |
| | | | genomic |
| 176 | | geranylgeranyl pyrophosphate synthase chloroplastic [Cannabis sativa] | Nucleic acid, coding |
| 177 | | (−)-kolavenyl diphosphate synthase TPS28. chloroplastic [Cannabis sativa] | Nucleic acid, coding |
| 178 | | solanesyl diphosphate synthase 3 chloroplastic/mitochondrial [Cannabis | Nucleic acid, coding |
| | | sativa] | |
| 179 | | terpene synthase 10-like isoform X1 [Cannabis sativa] | Nucleic acid, coding |
| 180 | | (−)-limonene synthase chloroplastic isoform X1 [Cannabis sativa] | Nucleic acid, coding |
| 181 | | cytochrome P450 71D11 (XP_030510234.1) [Cannabis sativa] | Nucleic acid, coding |
| 182 | | cytochrome P450 71D9 [Cannabis sativa] | Nucleic acid, coding |
| 183 | | cytochrome P450 71D11 (XP_030502273.1) [Cannabis sativa] | Nucleic acid, coding |
| 184 | | (−)-isopiperitenol/(−)-carveol dehydrogenase. mitochondrial-like [Cannabis | |
| | | sativa] | Nucleic acid, coding |
| 185 | | 2-alkenal reductase (NADP(+)-dependent) [Cannabis sativa] | Nucleic acid, coding |
| 186 | | uncharacterized protein LOC115704491 [Cannabis sativa] | Nucleic acid, coding |
| 187 | | cytochrome P450 71A22-like [Cannabis sativa] | Nucleic acid, coding |
| 188 | | (−)-germacrene D synthase-like [Cannabis sativa] | Nucleic acid, coding |
| 189 | | 2-isopropylmalate synthase 2. chloroplastic [Cannabis sativa] | Nucleic acid, coding |
| 190 | | transcription factor MYB61 isoform X1 [Cannabis sativa] | Nucleic acid, coding |
| 191 | | geranylgeranyl pyrophosphate synthase chloroplastic [Cannabis sativa] | Amino acid |
| 192 | | (−)-kolavenyl diphosphate synthase TPS28. chloroplastic [Cannabis sativa] | Amino acid |
| 193 | | solanesyl diphosphate synthase 3 chloroplastic/mitochondrial [Cannabis | Amino acid |
| | | sativa] | |
| 194 | | terpene synthase 10-like isoform X1 [Cannabis sativa] | Amino acid |
| 195 | | (−)-limonene synthase chloroplastic isoform X1 [Cannabis sativa] | Amino acid |
| 196 | | cytochrome P450 71D11 (XP_030510234.1) [Cannabis sativa] | Amino acid |
| 197 | | cytochrome P450 71D9 [Cannabis sativa] | Amino acid |
| 198 | | cytochrome P450 71D11 (XP 030502273.1) [Cannabis sativa] | Amino acid |
| 199 | | (−)-isopiperitenol/(−)-carveol dehydrogenase. mitochondrial-like [Cannabis | Amino acid |
| | | sativa] | |
| 200 | | 2-alkenal reductase (NADP(+)-dependent) [Cannabis sativa] | Amino acid |
| 201 | | uncharacterized protein LOC115704491 [Cannabis sativa] | Amino acid |
| 202 | | cytochrome P450 71A22-like [Cannabis sativa] | Amino acid |
| 203 | | (−)-germacrene D synthase-like [Cannabis sativa] | Amino acid |
| 204 | | 2-isopropylmalate synthase 2. chloroplastic [Cannabis sativa] | Amino acid |
| 205 | | transcription factor MYB61 isoform X1 [Cannabis sativa] | Amino acid |
| 206 | | Cyclase promoter | Nucleic acid |
| 207 | | Premnaspirodiene oxygenase (PSO) promoter | Nucleic acid |
| 208 | | Ribulose bisphosphate carboxylase small chain clone 512 promoter | Nucleic acid |

### BACKGROUND

[0004] Plants are capable of producing a wide variety of secondary metabolites, and many secondary metabolites are produced in above-ground structures called glandular trichomes. Terpenes, produced by a variety of plants and by some insects, represent a large and diverse class of organic compounds consisting of isoprene, a five carbon building block. Terpenoids are modified terpenes that contain additional functional groups.

[0005] Terpenoids comprise the largest and most diverse family of secondary metabolites present in plants. Terpenoids, which can be cyclic or acyclic, vary in size from five-carbon hemiterpenes to long complex molecules containing thousands of isoprene units. The olefinic backbone of terpenoids is made of multiples of the five-carbon (C) isoprene unit, with the major groups being monoterpenes (10C), sesquiterpenes (15C), and diterpenes (20C). These terpenoids are produced through the condensation of 5-C isoprene units (dimethylallyl diphosphate [DMAPP] and isopentenyl diphosphate [IPP]) most often by the sequential head-to-tail addition of DMAPP to IPP.

[0006] Terpenoid levels in plants such as tobacco and Cannabis can be enhanced and modified by targeted manipulation of gene expression of genes in terpene biosynthetic pathways in order to improve flavor and aroma characteristics of downstream plant-based products.

### SUMMARY

[0007] In one aspect, this disclosure provides a modified tobacco plant, tobacco seed, or part thereof, or a modified Cannabis plant, Cannabis seed, or part thereof, comprising a recombinant nucleic acid molecule comprising a nucleic acid sequence encoding a polypeptide involved in the biosynthesis of at least one terpene operably linked to a heterologous promoter.

[0008] In one aspect, this disclosure provides a modified tobacco plant, tobacco seed, or part thereof, or a modified Cannabis plant, Cannabis seed, or part thereof, comprising at least one non-natural mutation in an endogenous gene encoding a polypeptide involved in the biosynthesis of at least one terpene, where the modified tobacco plant or the modified Cannabis plant exhibits increased mRNA expression of the endogenous gene or increased accumulation of the polypeptide as compared to a control tobacco plant or a control Cannabis plant lacking the at least one non-natural mutation when grown under comparable conditions.

[0009] In one aspect, this disclosure provides a modified tobacco plant, tobacco seed, or part thereof, or a modified Cannabis plant, Cannabis seed, or part thereof, comprising a recombinant DNA construct comprising a heterologous promoter operably linked to a nucleic acid encoding at least one small RNA molecule capable of binding to and reducing the expression of a nucleic acid sequence encoding a polypeptide involved in the biosynthesis of at least one terpene.

[0010] In one aspect, this disclosure provides a recombinant nucleic acid molecule comprising a nucleic acid sequence encoding a polypeptide involved in the biosynthesis of at least one terpene operably linked to a heterologous promoter.

[0011] In one aspect, this disclosure provides a method of producing a modified tobacco plant or a modified Cannabis plant comprising: (a) introducing a recombinant nucleic acid molecule to at least one tobacco cell or Cannabis cell, where the recombinant nucleic acid molecule comprises a nucleic acid sequence encoding a polypeptide involved in terpene biosynthesis operably linked to a heterologous promoter; (b) selecting at least one tobacco cell or Cannabis cell comprising the recombinant nucleic acid molecule; and (c) regenerating a modified tobacco or Cannabis plant from the at least one tobacco or Cannabis cell selected in step (b) where the modified tobacco or Cannabis plant comprises an increased amount of at least one terpene in at least one tissue as compared to a control tobacco plant lacking the recombinant nucleic acid molecule when grown under comparable conditions.

[0012] In one aspect, this disclosure provides a method of producing a modified tobacco plant or a modified Cannabis plant comprising: (a) inducing at least one non-natural mutation in at least one tobacco or Cannabis cell in an endogenous gene encoding a polypeptide involved in terpene biosynthesis; (b) selecting at least one tobacco or Cannabis cell comprising the at least one non-natural mutation from step (a); and (c) regenerating a modified tobacco or Cannabis plant from the at least one tobacco or Cannabis cell selected in step (b), where the modified tobacco or Cannabis plant comprises an increased amount of at least one terpene in at least one tissue as compared to a control tobacco or Cannabis plant lacking the at least one non-natural mutation when grown under comparable conditions.

[0013] In one aspect, this disclosure provides a method of producing a modified tobacco plant or a modified Cannabis plant comprising: (a) introducing a recombinant DNA construct to at least one tobacco or Cannabis cell, where said recombinant DNA construct comprises a heterologous promoter operably linked to a nucleic acid encoding at least one small RNA molecule capable of binding to and reducing the expression of a nucleic acid sequence encoding a polypeptide involved in the biosynthesis of at least one terpene; (b) selecting at least one tobacco or Cannabis cell comprising the recombinant DNA construct; and (c) regenerating at least one modified tobacco or Cannabis plant from the at least one tobacco or Cannabis cell selected in step (b), where the modified tobacco or Cannabis plant comprises a reduced amount of at least one terpene in at least one tissue as compared to a control tobacco or Cannabis plant lacking the recombinant DNA construct when grown under comparable conditions.

[0014] In one aspect, this disclosure provides a method comprising preparing a tobacco product or a Cannabis product using cured tobacco or Cannabis material from a modified tobacco or Cannabis plant, where the modified tobacco or Cannabis plant comprises a recombinant nucleic acid molecule comprising a nucleic acid sequence encoding a polypeptide involved in the biosynthesis of at least one terpene operably linked to a heterologous promoter.

[0015] In one aspect, this disclosure provides a method comprising preparing a tobacco product or a Cannabis product using cured tobacco or Cannabis material from a modified tobacco or Cannabis plant, where the modified tobacco or Cannabis plant comprises at least one non-natural mutation in an endogenous gene encoding a polypeptide involved in the biosynthesis of at least one terpene, where the modified tobacco or Cannabis plant exhibits increased mRNA expression of the endogenous gene or increased accumulation of the polypeptide as compared to a control tobacco or Cannabis plant lacking the at least one non-natural mutation when grown under comparable conditions.

[0016] In one aspect, this disclosure provides a method comprising preparing a tobacco or Cannabis product using cured tobacco or Cannabis material from a modified tobacco or Cannabis plant, where the modified tobacco or Cannabis plant comprises a recombinant DNA construct comprising a heterologous promoter operably linked to a nucleic acid molecule encoding at least one small RNA molecule capable of binding to and reducing the expression of a nucleic acid sequence encoding a polypeptide involved in the biosynthesis of at least one terpene.

[0017] In one aspect, this disclosure provides a method comprising transforming a tobacco or Cannabis cell with a recombinant nucleic acid molecule, where the recombinant nucleic acid molecule comprises a nucleic acid sequence encoding a polypeptide involved in the biosynthesis of at least one terpene operably linked to a heterologous promoter.

[0018] In one aspect, this disclosure provides a method comprising transforming a tobacco or Cannabis cell with a recombinant nucleic acid molecule, where the recombinant nucleic acid molecule comprises a heterologous promoter operably linked to a nucleic acid encoding at least one small RNA molecule capable of binding to and reducing the expression of a nucleic acid sequence encoding a polypeptide involved in the biosynthesis of at least one terpene.

[0019] In one aspect, this disclosure provides a method for producing a tobacco plant or a Cannabis plant, the method comprising: (a) crossing at least one tobacco or Cannabis plant of a first tobacco or Cannabis variety with at least one tobacco or Cannabis plant of a second tobacco or Cannabis variety to produce at least one progeny tobacco or Cannabis seed, where the at least one tobacco or Cannabis plant of the first tobacco or Cannabis variety comprises a recombinant nucleic acid molecule comprising a nucleic acid sequence encoding a polypeptide involved in the biosynthesis of at least one terpene operably linked to a heterologous promoter; and (b) selecting for at least one progeny tobacco or Cannabis seed, or a plant germinated therefrom, where the at least one progeny tobacco or Cannabis seed or plant germinated therefrom comprises the recombinant nucleic acid molecule.

[0020] In one aspect, this disclosure provides a method for producing a tobacco plant or a Cannabis plant, the method comprising: (a) crossing at least one tobacco or Cannabis plant of a first tobacco or Cannabis variety with at least one tobacco or Cannabis plant of a second tobacco or Cannabis variety to produce at least one progeny tobacco or Cannabis seed, where the at least one tobacco or Cannabis plant of the first tobacco or Cannabis variety comprises at least one non-natural mutation in an endogenous gene encoding a polypeptide involved in the biosynthesis of at least one terpene, where the at least one tobacco or Cannabis plant of the first tobacco or Cannabis variety exhibits increased mRNA expression of the endogenous gene or increased accumulation of the polypeptide as compared to a control tobacco or Cannabis plant of the first tobacco or Cannabis variety lacking the at least one non-natural mutation when grown under comparable conditions; and (b) selecting for at least one progeny tobacco or Cannabis seed, or a plant germinated therefrom, where the at least one progeny tobacco or Cannabis seed or plant germinated therefrom comprises the at least one non-natural mutation.

[0021] In one aspect, this disclosure provides for a method for producing a tobacco plant or a Cannabis plat, the method comprising: (a) crossing at least one tobacco or Cannabis plant of a first tobacco or Cannabis variety with at least one tobacco or Cannabis plant of a second tobacco or Cannabis variety to produce at least one progeny tobacco or Cannabis seed, where the at least one tobacco or Cannabis plant of the first tobacco or Cannabis variety comprises a recombinant nucleic acid molecule comprising a heterologous promoter operably linked to a nucleic acid molecule encoding at least one small RNA molecule capable of binding to and reducing the expression of a nucleic acid sequence encoding a polypeptide involved in the biosynthesis of at least one terpene; and (b) selecting for at least one progeny tobacco or Cannabis seed, or a plant germinated therefrom, where the at least one progeny tobacco or Cannabis seed or plant germinated therefrom comprises the recombinant nucleic acid molecule.

### BRIEF DESCRIPTION OF THE DRAWINGS

[0022] FIG. 1 depicts phenylpropanoid, cytoplasmic mevalonate (MVA), plastidic methylerythritol phosphate (MEP), and polyketide biosynthetic pathways in plants. Transport of precursors is represented by dashed arrows, while direct catalytic reactions are depicted by bold arrows. Abbreviations used: IPP, isopentenyl diphosphate; DMAPP, dimethylallyl diphosphate; GPP, geranyl diphosphate; FPP, farnesyl diphosphate; MVA, mevalonate; MEP, methylerythritol phosphate.

[0023] FIG. 2 depicts the menthol biosynthetic pathway in plants.

[0024] FIG. 3 depicts the cis-abienol biosynthetic pathway in plants.

[0025] FIG. 4 depicts the cembratrienediol biosynthesis pathway in plants.

[0026] FIG. 5 depicts the levopimaric acid biosynthesis pathway in plants.

[0027] FIG. 6 depicts the L-leucine biosynthesis pathway in plants.

[0028] FIG. 7 depicts gene expression in trichomes of terpene biosynthesis genes.

[0029] FIG. 8 depicts the abundance of transcripts of NtNMD generated by RNA-sequencing in the flower and leaves of tobacco cultivars TN90 and K326 at different stages of plant development (d: day; w: week).

[0030] FIG. 9 depicts the abundance of transcripts of NABS generated by RNA-sequencing in the flower and leaves of tobacco cultivars TN90 and K326 at different stages of plant development (d: day; w: week).

[0031] FIG. 10 depicts a representative vector construct for overexpression of candidate genes in tobacco. Each promoter is operably linked to a candidate gene and a sequence encoding green fluorescent protein (G3GFP).

[0032] FIG. 11 depicts a map of a representative vector, pGWB551, that can be used for overexpression and knockdown of candidate terpene biosynthesis genes in tobacco.

[0033] FIGS. 12 to 18 depict green fluorescent protein (GFP) expression (driven by the CaMV 35S promoter) in calli in transgenic tobacco plant lines. FIG. 12 shows geranylgeranyl diphosphate synthase-TN90; FIG. 13 shows geranylgeranyl diphosphate synthase-Nb; FIG. 14 shows cembratrienol synthase 2a-Nb; FIG. 15 shows neomenthol dehydrogenase-Nb; FIG. 16 shows cis-abienol synthase-TN90; FIG. 17 shows menthofuran synthase-Nb; and FIG. 18 shows GFP-TN90. For FIGS. 12 to 18, Nb=N. benthamiana; and TN90=tobacco cultivar ‘TN90.’

[0034] FIG. 19 depicts relative gene expression of NtaABS, and FIG. 20 depicts relative gene expression of NABS in T₀ transgenic tobacco plants transformed with cis-abienol synthase overexpression constructs. NtaABS and NtABS are each operably linked to a CaMV 35S promoter.

[0035] FIG. 21 depicts relative gene expression of NtNMD operably linked to a CaMV 35S promoter in T₀ transgenic tobacco plants transformed with menthone reductase overexpression constructs.

[0036] FIG. 22 depicts relative gene expression of neophytadiene in NtNMD overexpression T₀ transgenic tobacco plants compared to a T90 control plant.

[0037] FIG. 23 depicts relative gene expression in NtABS/NtaABS overexpression T₀ transgenic tobacco plants compared to a TN90 control plant.

[0038] FIG. 24 depicts the relative gene expression levels of NtNMD (SEQ ID NO: 15) in T₁ transgenic plants of the tobacco line TN90 overexpressing NtNMD as compared to a wildtype TN90 plant (not shown).

[0039] FIG. 25 depicts the relative gene expression levels of NtaABS (SEQ ID NO: 4) in T₁ transgenic plants of the tobacco line TN90 overexpressing NtaABS as compared to a wildtype TN90 plant (not shown).

### DETAILED DESCRIPTION

[0040] Unless defined otherwise, technical and scientific terms used herein have the same meaning as commonly understood by one of ordinary skill in the art. One skilled in the art will recognize many methods can be used in the practice of the present disclosure. Indeed, the present disclosure is in no way limited to the methods and materials described. Where a term is provided in the singular, the inventors also contemplate aspects of the disclosure described by the plural of that term, and vice versa. Where there are discrepancies in terms and definitions used in references that are incorporated by reference, the terms used in this application shall have the definitions given herein. Other technical terms used have their ordinary meaning in the art in which they are used, as exemplified by various art-specific dictionaries, for example, “The American Heritage® Science Dictionary” (Editors of the American Heritage Dictionaries, 2011, Houghton Mifflin Harcourt, Boston and New York), the “McGraw-Hill Dictionary of Scientific and Technical Terms” (6th edition, 2002, McGraw-Hill, New York), or the “Oxford Dictionary of Biology” (6th edition, 2008, Oxford University Press, Oxford and New York).

[0041] Any references cited herein, including, e.g., all patents, published patent applications, and non-patent publications, are incorporated herein by reference in their entirety.

[0042] When a grouping of alternatives is presented, any and all combinations of the members that make up that grouping of alternatives is specifically envisioned. For example, if an item is selected from a group consisting of A, B, C, and D, the inventors specifically envision each alternative individually (e.g., A alone, B alone, etc.), as well as combinations such as A, B, and D; A and C; B and C; etc. The term “and/or” when used in a list of two or more items means any one of the listed items by itself or in combination with any one or more of the other listed items. For example, the expression “A and/or B” is intended to mean either or both of A and B—i.e., A alone, B alone, or A and B in combination. The expression “A, B and/or C” is intended to mean A alone, B alone, C alone, A and B in combination, A and C in combination, B and C in combination, or A, B, and C in combination.

[0043] When a range of numbers is provided herein, the range is understood to be inclusive of the edges of the range as well as any number between the defined edges of the range. For example, “between 1 and 10” includes any number between 1 and 10, as well as the number 1 and the number 10

[0044] The term “about” is used herein to mean approximately, roughly, around, or in the region of. When the term “about” is used in conjunction with a numerical range, it modifies that range by extending the boundaries above and below the numerical values set forth and is understood to mean plus or minus 10%. For example, “about 100” would include from 90 to 110.

[0045] As used herein, the singular form “a,” “an,” and “the” include plural references unless the context clearly dictates otherwise. For example, the term “a compound” or “at least one compound” may include a plurality of compounds, including mixtures thereof.

[0046] As used herein, terms or phrases such as “about,” “at least,” “at least about,” “at most,” “less than,” “greater than,” “within,” or “alike,” when followed by a series of list of numbers of percentages, such terms or phrases are deemed to modify each and every number of percentage in the series or list, regardless whether the adverb, preposition, or other modifier phrase is reproduced prior to each and every member.

[0047] Any tobacco plant, or part thereof, provided herein is specifically envisioned for use with any method provided herein. Similarly, any modified tobacco plant, or part thereof, is specifically envisioned for use with any method provided herein. Any Cannabis plant, or part thereof, provided herein is specifically envisioned for use with any method provided herein. Similarly, any modified Cannabis plant, or part thereof, is specifically envisioned for use with any method provided herein.

[0048] Any nucleic acid sequence, amino acid sequence, or other composition provided herein is specifically envisioned for use with any method provided herein.

[0049] Terpenes represent a large and diverse class of organic compounds consisting of isoprene, a five carbon building block. Terpenes are produced by a variety of plants and by some insects. Terpenes often have a strong odor, and may protect the plants that produce them by deterring herbivores. Terpenoids are modified terpenes that contain additional functional groups.

[0050] The largest and most diverse family of secondary metabolite in plants is the terpenoids. Terpenoids are synthesized through the condensation of 5-C isoprene units (dimethylallyl diphosphate [DMAPP] and isopentenyl diphosphate [IPP]) most often by the sequential head-to-tail addition of DMAPP to IPP. The plastidic methylerythritol phosphate (MEP) pathway consists of seven steps that convert pyruvate and glyceraldehyde-3-phosphate into IPP and DMAPP. See FIG. 1. The initial cyclization processes are catalyzed by different terpene synthases (TPS) and enzyme variation leads to variation in monoterpene structure. Terpenes can range in size from the five-carbon hemiterpenes to long complex molecules containing thousands of isoprene units. Some monoterpene synthases can produce more than one product.

[0051] In addition to terpene synthases, trans-isoprenyl diphosphate synthases (IDSs) are among the core enzymes involved in the generation of diverse terpenoids. TPSs and IDSs share a conserved alpha-terpenoid synthase fold and a trinuclear metal cluster for catalysis.

[0052] A monoterpene is a cyclic molecule composed of two isoprene units. Monoterpenes are C₁₀ colorless, lipophilic, and structurally diverse (cyclic and acyclic) volatile molecules that impart characteristic aromas and flavors on plants. These molecules also play an important role as chemoattractant between plants and their pollinator species as well as deterrents in plant-plant and plant-herbivore communication and are key components of plant defense. Monoterpene production and accumulation are generally restricted to glandular trichomes, with plants lacking such specialized structures typically accumulating only trace quantities of monoterpenes.

[0053] Terpene synthase (TPS) genes can be grouped into seven clades (TPS-a, TPS-b, TPS-c, TPS-d, TPS-e/f, TPS-g, and TPS-h) where TPS-d and TPS-h are specific to gymnosperms and the lycopod Selaginalla moellendorffii and TPS-a, TPS-b, and TPS-g are specific to angiosperm. TPS-a contains mostly sesquiterpene synthases and diterpene synthases. Neophytadiene is an example of an abundant sesquiterpenoid in tobacco. The TPS-b and TPS-g clades comprise mostly monoterpene synthases. The genome of cultivated tomato (S. lycopersicum), a relative of tobacco, contains 44 TPS genes of which 29 appear to be functional or potentially functional. The expression patterns of the tomato TPS genes in leaf and stem trichomes are quantitatively and qualitatively different, consistent with the distinct volatile profiles of these two organs. The tissue-specific differences in gene expression in Solanaceae species is in part responsible for the observed distinct intraspecific and interspecific chemical variability. Many terpene synthases form multiple products from the same substrate.

[0054] The aromatic (smell) and organoleptic (taste/flavor) properties of tobacco leaf tissues can be enhanced by targeted genetic manipulation of the biosynthetic pathways that control terpenoid formation. Similarly, Cannabis resin contains a variety of monoterpenes and sesquiterpenes. Two major biosynthetic pathways control terpenoid formation. One pathway controls the formation of menthol and related compounds (see FIG. 2) and the other controls the formation of labdanoids, such as cis-abienol (see FIG. 3).

[0055] Targeted overexpression of genes in the menthol biosynthetic pathway can enhance the accumulation of menthol in tobacco plants. The C10 monoterpene (−)-menthol is a characteristic constituent of Mentha x piperita (peppermint), a plant of economic importance for the production of essential oil used various industrial manufacturing and medicinal purposes. In Mentha species, menthol biosynthesis and storage are restricted to the peltate glandular trichomes (oil glands) on the aerial surfaces of the plant.

[0056] The biosynthesis of (−)-menthol involves eight enzymatic steps. The formation and subsequent cyclization of the universal monoterpene precursor geranyl diphosphate to the parent olefin (−)-(4S)-limonene is the first committed enzymatic reaction in the menthol biosynthetic pathway.

[0057] Genes encoding enzymes of the menthol biosynthetic pathway include geranyl diphosphate synthase (GDP) (SEQ ID NOs: 7, 28, and 49), Limonene synthase (LS) (SEQ ID NOs: 8, 29, and 50), Limonene 3-hydroxylase (L30H) (SEQ ID NOs: 10, 31, and 52), Limonene Synthase chloroplastic isoform X1 (SEQ ID NOs: 165, 181, and 197), Isopiperitenol dehydrogenase (IPD) (SEQ ID NOs: 13, 34, 55, 169, 185, and 201), pulegone reductase (SEQ ID NOs: 14, 35, and 56), menthofuran synthase (MFS) (SEQ ID NOs: 16, 37, and 58) and Menthone reductase, which is alternatively called neomenthol dehydrogenase (NtNMD) (SEQ ID NOs: 15, 36, and 57). See FIG. 2.

[0058] The second major terpenoid biosynthetic pathway is involved in the formation of labdanoids, such as cis-abienol (see FIG. 3). The major labdanoids found in some aromatic plants, including some forms of tobacco, are Cis-abienol and labdenediol. Cis-abienol is a diterpenoid abundant in some Oriental tobacco varieties, but not common in commercial flue and Burley type tobaccos such as TN90.

[0059] The biosynthesis of Cis-abienol proceeds in two steps (see FIG. 3). A class-II terpene synthase (8-hydroxy-copalyl diphosphate synthase) (SEQ ID NOs: 3, 24, 45, 115, 129, and 143) synthesizes 8-hydroxy-copalyl diphosphate from geranylgeranyl diphosphate, and a kaurene synthase-like (KSL) enzyme (cis-abienol synthase) (SEQ ID NOs: 4, 5, 6, 25, 26, 27, 46, 47, 48, 119, 133, and 147) converts 8-hydroxy-copalyl diphosphate to Cis-abienol.

[0060] Additional biosynthetic pathways used for targeted aroma enhancement include the cembratrienediol biosynthesis pathway, see FIG. 4, the levopimaric acid biosynthesis pathway, see FIG. 5, and the L-leucine biosynthesis pathway, see FIG. 6. Cembratrienol synthase 2a (SEQ ID NOs: 17, 38, 59, 114, 128, and 142) is a key enzyme in the cembratrienediol biosynthesis pathway (see FIG. 4). The diterpenes cembratrieneols (CBTols) and cembratrienediols (CBTdiols), are considered important defense compounds, and are produced in the trichomes. Levopimaradiene synthase (SEQ ID NOs: 18, 39, and 60) is a key enzyme in the levopimaric acid biosynthesis pathway (see FIG. 5). Levopimaric acid is reported to be involved in diterpene resin acid production in conifers. 2-isopropylmalate synthetase (IPS) (SEQ ID NOs: 19, 40, 61, 116, 124, 130, 138, 144, 152, 175, 191, and 207) and 2-oxoisovalerate dehydrogenase (SEQ ID NOs: 20, 21, 41, 42, 62, and 63) are key enzymes in the L-leucine biosynthesis pathway (see FIG. 6). Leucine is one of the branched-chain amino acids that contributes to aroma characteristics in oriental tobacco.

[0061] In an aspect this disclosure provides a modified tobacco or Cannabis plant, tobacco or Cannabis seed, or part thereof comprising a recombinant nucleic acid molecule comprising a nucleic acid sequence encoding a polypeptide involved in the biosynthesis of at least one terpene operably linked to a heterologous promoter.

[0062] In a further aspect, this disclosure provides a modified tobacco or Cannabis plant, tobacco or Cannabis seed, or part thereof comprising at least one non-natural mutation in an endogenous gene encoding a polypeptide involved in the biosynthesis of at least one terpene, where the modified tobacco or Cannabis plant exhibits increased mRNA expression of the endogenous gene or increased accumulation of the polypeptide as compared to a control tobacco or Cannabis plant lacking the at least one non-natural mutation when grown under comparable conditions.

### Terpenes

[0063] Terpenes are a class of aromatic organic compound produced by plants and some insects. Terpenes are members of a group of volatile unsaturated hydrocarbons found in the essential oils of plants, based on a cyclic molecule having the formula C₁₀H₁₆; and related structures such as, but not limited to, compounds such as sesquiterpene with the formula C₁₅H₂₄, or a simple derivative of such a compound. Terpenes are hydrocarbon molecules that are often used by plants to either directly deter herbivory or to attract predators or parasites of plant herbivores. Non-limiting examples of terpenes include citral, menthol, camphor, salvinorin A, cannabinoids, and curcuminoids.

[0064] Several classes of terpenes have been identified in Cannabis, including, but not limited to, myrcene, pinene, limonene, caryophyllene, linalool, terpinolene, camphene, terpineol, phellandrene, carene, humulene, pulegone, and geraniol. Myrcene, specifically beta-myrcene, is a monoterpene and the most common terpene produced by Cannabis. Pinene is a bicyclic monoterpenoid. Two naturally occurring structural isomers of pinene are known: alpha-pinene and beta-pinene. Limonene is a monocyclic monoterpenoid and one of the two major compounds formed from pinene. Caryophyllene, specifically beta caryophyllene, is a sesquiterpene common to many plants besides Cannabis, including cloves, cinnamon leaves, and black pepper. Caryophyllene is the only terpene known to interact with the endocannabinoid system, as beta-caryophyllene is a functional cannabinoid-2 receptor (CB2) agonist. Linalool is a non-cyclic monoterpenoid, a critical precursor in the formation of Vitamin E, and has been isolated from many different plants. Delta-3-carene is a bicyclic monoterpene. Alpha-Terpineol, terpinen-4-ol, and 4-terpineol are three closely related monoterpenoids. Humulene is a sesquiterpene also known as alpha-humulene. Pulegone, a monocyclic monoterpenoid, is a minor component of Cannabis.

[0065] In an aspect, a terpene is a terpenoid. Terpenoids (also referred to as isoprenoids) are modified terpenes that contain additional functional groups, which often include oxygen. Terpenoids, which can be cyclic or acyclic, vary in size from five-carbon hemiterpenes to long complex molecules containing thousands of isoprene units. Terpenoids are produced through the condensation of five-carbon isoprene units (e.g., dimethylallyl diphosphate (DMAPP) and isopentenyl diphosphate (IPP)), most often by the sequential head-to-tail addition of DMAPP to IPP. The initial cyclization processes are catalyzed by different terpene synthases and enzyme variation leads to variation in monoterpene structure.

[0066] Terpenoids are classified according to the number of isoprene units that comprise the parent terpene. A hemiterpenoid comprises one isoprene unit. A monoterpenoid comprises two isoprene units. A sesquiterpenoid comprises three isoprene units. A diterpenoid comprises four isoprene units. A sesterterpenoid comprises five isoprene units. A triterpenoid comprises six isoprene units. A tetraterpenoid comprises eight isoprene units. A polyterpenoid comprises more than eight isoprene units.

[0067] In an aspect, a polypeptide is involved in the biosynthesis of at least one terpene. In an aspect, a polypeptide is involved in the biosynthesis of at least one terpenoid. In an aspect, a polypeptide is involved in the biosynthesis of at least one terpenoid selected from the group consisting of a hemiterpenoid, a monoterpenoid, a sesquiterpenoid, a diterpenoid, a sesterterpenoid, a triterpenoid, a tetraterpenoid, and a polyterpenoid. In an aspect, a polypeptide is involved in the biosynthesis of at least one terpene selected from the group consisting of a hemiterpene, a monoterpene, a sesquiterpene, a diterpene, a sesterterpene, a triterpene, a tetraterpene, and a polyterpene.

[0068] As used herein, the term “biosynthesis” refers to the production of a complex molecule (e.g., without being limiting, a terpene or terpenoid) within a plant or plant cell. To be “involved” with the biosynthesis of a compound, a polypeptide can directly interact with a substrate during the biosynthesis of the compound, or the polypeptide can affect the expression (positively or negatively) of a polypeptide that directly interacts with a substrate (e.g., a transcription factor that promotes the expression of an enzyme that converts a substrate to a new form or a repressor that inhibits expression of an enzyme that converts a substrate to a new form). Examples of biosynthetic pathways can be found in FIGS. 1-6. In an aspect, a transcription factor is MYB61 isoform X1. As a non-limiting example, SEQ ID NOs: 208 and 176 are amino acid and nucleic acid sequences, respectively, for transcription factor MYB61 isoform X1.

[0069] In an aspect, a polypeptide is involved in the biosynthesis of a hemiterpene. In an aspect, a polypeptide is involved in the biosynthesis of a hemiterpenoid. In an aspect, a polypeptide is involved in the biosynthesis of a monoterpene. In an aspect, a polypeptide is involved in the biosynthesis of a monoterpenoid. In an aspect, a polypeptide is involved in the biosynthesis of a sesquiterpene. In an aspect, a polypeptide is involved in the biosynthesis of a sesquiterpenoid. In an aspect, a polypeptide is involved in the biosynthesis of a diterpene. In an aspect, a polypeptide is involved in the biosynthesis of a diterpenoid. In an aspect, a polypeptide is involved in the biosynthesis of a sesterterpene. In an aspect, a polypeptide is involved in the biosynthesis of a sesterterpenoid. In an aspect, a polypeptide is involved in the biosynthesis of a triterpene. In an aspect, a polypeptide is involved in the biosynthesis of a triterpenoid. In an aspect, a polypeptide is involved in the biosynthesis of a tetraterpene. In an aspect, a polypeptide is involved in the biosynthesis of a polyterpenoid. In an aspect, a polypeptide is involved in the biosynthesis of a monoterpene. In an aspect, a polypeptide is involved in the biosynthesis of a polyterpenoid.

[0070] Terpene synthase (TPS) genes can be grouped into seven clades: TPS-a, TPS-b, TPS-c, TPS-d, TPS-e/f, TPS-g, and TPS-h. TPS-a, TPS-b, and TPS-g are restricted to angiosperms, and TPS-d and TPS-h are specific to gymnosperms and the lycopod Selaginalla moellendorffii. The TPS-a clade comprises mostly sesquiterpene synthases and diterpene synthases, while the TPS-b and TPS-g clades comprise mostly monoterpene synthases.

### Terpene Synthase-Like Genes

[0071] In an aspect, a polypeptide involved in the biosynthesis of at least one terpenoid is a TPS-a clade member. In an aspect, a polypeptide involved in the biosynthesis of at least one terpenoid is a TPS-b clade member. In an aspect, a polypeptide involved in the biosynthesis of at least one terpenoid is a TPS-c clade member. In an aspect, a polypeptide involved in the biosynthesis of at least one terpenoid is a TPS-e/f clade member. In an aspect, a polypeptide involved in the biosynthesis of at least one terpenoid is a TPS-g clade member. In an aspect, a polypeptide involved in the biosynthesis of at least one terpenoid is a member of a clade selected from the group consisting of TPS-a, TPS-b, TPS-c, TPS-e/f, and TPS-g.

[0072] In an aspect, a terpene is menthol. In an aspect, a terpene is menthol or a related compound. In an aspect, a terpene is a labdanoid. In an aspect, a terpene is cembratrienediol. In an aspect, a terpene is levopimaric acid. In an aspect, a terpene is L-leucine. In an aspect, a terpene is neophytadiene. In an aspect, a labdanoid is cis-abienol. In an aspect, a labdanoid is labdane-diol. In an aspect, a terpene is selected from the group consisting of menthol or a related compound, a labdanoid, cembratrienediol, levopimaric acid, and L-leucine. In an aspect, a terpene is selected from the group consisting of menthol or a related compound, a labdanoid, cembratrienediol, levopimaric acid, L-leucine, and neophytadiene. In an aspect, a terpene is selected from the group consisting of menthol, a labdanoid, cembratrienediol, levopimaric acid, and L-leucine. In an aspect, a terpene is selected from the group consisting of menthol, a labdanoid, cembratrienediol, levopimaric acid, L-leucine, and neophytadiene.

[0073] In an aspect, a terpene is myrcene. In an aspect, a terpene is pinene. In an aspect, a terpene is limonene. In an aspect, a terpene is caryophyllene. In an aspect, a terpene is linalool. In an aspect, a terpene is terpinolene. In an aspect, a terpene is camphene. In an aspect, a terpene is terpineol. In an aspect, a terpene is phellandrene. In an aspect, a terpene is carene. In an aspect, a terpene is humulene. In an aspect, a terpene is pulegone. In an aspect, a terpene is geraniol.

[0074] As used herein, “menthol” refers to the organic compound having a chemical formula of C₁₀H₂₀O and the International Union of Pure and Applied Chemistry (IUPAC) name 5-Methyl-2-(propan-2-yl)cyclohexan-1-ol. Menthol is also referred to as “(−)-Menthol.” Related compounds of menthol include, but are not limited to, (+)-Menthol, (+)-Isomenthol, (+)-Neomenthol, (+)-Neoisomenthol, (−)-Isomenthol, (−)-Neomethol, and (−)-Neoisomenthol. In an aspect, a related compound of menthol is selected from the group consisting of (+)-Menthol, (+)-Isomenthol, (+)-Neomenthol, (+)-Neoisomenthol, (−)-Isomenthol, (−)-Neomethol, and (−)-Neoisomenthol.

[0075] As used herein, “neophytadiene” refers to the organic compound having a chemical formula of C₂₀H₃₈ and the IUPAC name of 7,11,15-trimethyl-3-methylidenehexadec-1-ene.

[0076] As used herein, “cembratrienediol” refers to the organic compound having a chemical formula of C₂₀H₃₄O₂ and the IUPAC name (1R,3R,4Z,8Z,12S,13Z)-1,5,9-trimethyl-12-propan-2-ylcyclotetradeca-4,8,13-triene-1,3-diol. Cembratrienediol is also referred to as “beta-Cembrenediol.”

[0077] As used herein, “levopimaric acid” refers to the organic compound having a chemical formula of C₂₀H₃₀O₂ and the IUPAC name (1R,4aR,4bS,10aR)-1,4a-dimethyl-7-propan-2-yl-2,3,4,4b,5,9,10,10a-octahydrophenanthrene-1-carboxylic acid. Levopimaric acid is also referred to as “L-Pimaric acid.” In an aspect, levopimaric acid is involved in diterpene resin acid production.

[0078] As used herein, “L-leucine” refers to the amino acid having the chemical formula C₆H₁₂NO₂ and the IUPAC name (2S)-2-amino-4-methylpentanoic acid.

[0079] As used herein, a “labdanoid” refers to a terpenoid derivative of the fundamental parent labdane, a diterpene. A labdane has the chemical formula C₂₀H₃₈ and the IUPAC name (1S,2S,4aS,8aR)-2,5,5,8a-tetramethyl-1-[(3R)-3-methylpentyl]-1,2,3,4,4a,6,7,8-octahydronaphthalene.

[0080] A non-limiting example of a labdanoid is cis-abienol. As used herein, “cis-abienol” refers to the organic compound having a chemical formula of C₂₀H₃₄O and the IUPAC name (1R,2R,4aS,8aS)-2,5,5,8a-tetramethyl-1-[(2Z)-3-methylpenta-2,4,-dienyl]-3,4,4a,6,7,8-hexahydro-1H-naphthalen-2-ol.

[0081] As used herein, “myrcene” refers to the compound having a chemical formula of C₁₀H₁₆ and the IUPAC name 7-Methyl-3-methylene-octa-1,6-diene. Myrcene, also known as beta-myrcene or alpha-myrcene, belongs to the class of organic compounds known as acyclic monoterpenoids. Thus, myrcene is considered to be an isoprenoid lipid molecule.

[0082] As used herein, “pinene” refers to the compound having a chemical formula of C₁₀H₁₆ and the IUPAC name (1S,5S)-2,6,6-Trimethylbicyclo[3.1.1]hept-2-ene ((−)-α-Pinene). (+)-a-Pinene, also known as 2-pinene or acintene a, belongs to the class of organic compounds known as bicyclic monoterpenoids. These are monoterpenoids containing exactly 2 rings, which are fused to each other. Alpha-pinene is a pinene that is bicyclo[3.1.1]hept-2-ene substituted by methyl groups at positions 2, 6 and 6 respectively. It has a role as a plant metabolite.

[0083] As used herein, “limonene” refers to the compound having a chemical formula of C₁₀H₁₆ and the IUPAC name 1-methyl-4-(1-methylethenyl)-cyclohexene. Limonene, (+/−)- is a racemic mixture of limonene, a natural cyclic monoterpene.

[0084] As used herein, “caryophyllene” or “beta caryophyllene” refers to the organic compound having a chemical formula of C₁₅H₂₄ and the IUPAC name (1R,4E,9S)-4,11,11-trimethyl-8-methylidenebicyclo[7.2.0]undec-4-ene. Beta-Caryophyllene is classified as a sesquiterpenoid. (−)-beta-caryophyllene is a beta-caryophyllene in which the stereocenter adjacent to the exocyclic double bond has S configuration, while the remaining stereocenter has R configuration. It is the most commonly occurring form of beta-caryophyllene, occurring in many essential oils.

[0085] As used herein, “linalool” refers to the compound having a chemical formula of C₁₀H₁₈O and the IUPAC name 3,7-dimethylocta-1,6-dien-3-ol. Beta-linalool, also known as 3,7-Dimethyl-1,6-octadien-3-ol or 2,6-dimethylocta-2,7-dien-6-ol, is classified as an acyclic monoterpenoid.

[0086] As used herein, “terpinolene” refers to the organic compound having a chemical formula of C₁₀H₁₆ and the IUPAC name 1-methyl-4-propan-2-ylidenecyclohexene. Terpinolene, also known as alpha-terpinolene or isoterpinene, is classified as a menthane monoterpenoid. These are monoterpenoids with a structure based on an o-, m-, or p-menthane backbone.

[0087] As used herein, “camphene” refers to the organic compound having a chemical formula of C₁₀H₁₆ and the IUPAC name 2,2-dimethyl-3-methylidenebicyclo[2.2.1]heptane. Camphene is classified as a bicyclic monoterpenoid, containing two rings which are fused to each other. Camphene is a monoterpene with a bicyclic skeleton that is bicyclo[2.2.1]heptane substituted by geminal methyl groups at position 2 and a methylidene group at position 3.

[0088] As used herein, “terpineol” refers to the monoterpene alcohol of which there are four isomers: alpha-terpineol, beta-terpineol, gamma-terpineol, and terpinen-4-ol. Beta-terpineol and gamma-terpineol differ only by the location of the double bond. Terpineol is usually a mixture of these isomers with alpha-terpineol as the major constituent. As used herein, “alpha terpineol” refers to the organic compound having a chemical formula of C₁₀H₁₈O and the IUPAC name 2-(4-methylcyclohex-3-en-1-yl)propan-2-ol.

[0089] As used herein, “phellandrene” refers to the cyclic monoterpenes “alpha-phellandrene” or “beta-phellandrene.” As used herein, “alpha-phellandrene” refers to the organic compound having a chemical formula of C₁₀H₁₆ and the IUPAC name 2-methyl-5-propan-2-ylcyclohexa-1,3-diene. Alpha-phellandrene is also known as alpha-phellandren or dihydro-p-cymene. As used herein, “beta-phellandrene” refers to the organic compound having a chemical formula of C₁₀H₁₆ and the IUPAC name 3-methylidene-6-propan-2-ylcyclohexene. Beta-phellandrene is also known as beta-phellandren or 2-p-menthadiene.

[0090] As used herein, “carene” or “alpha carene” refers to the organic compound having a chemical formula of C₁₀H₁₆ and the IUPAC name 3,7,7-trimethylbicyclo[4.1.0]hept-3-ene. Alpha-Carene, also known as 3-carene or delta-car-3-ene, is classified as a bicyclic monoterpenoid.

[0091] As used herein, “humulene” refers to the organic compound having a chemical formula of C₁₅H₂₄ and the IUPAC name (1E,4E,8E)-2,6,6,9-tetramethylcycloundeca-1,4,8-triene.

[0092] As used herein, “pulegone” refers to the organic compound having a chemical formula of C₁₀H₁₆O and the IUPAC name (5R)-5-methyl-2-propan-2-ylidenecyclohexan-1-one. (+)-Pulegone, also known as D-pulegone or cis-isopulegone, is classified as a menthane monoterpenoid.

[0093] As used herein, “geraniol” refers to the organic compound having a chemical formula of C₁₀H₁₈O and the IUPAC name (2E)-3,7-dimethylocta-2,6-dien-1-ol. Geraniol is an acyclic monoterpenoid, and is also referred to as 2E-Geraniol, (e)-geraniol, or geranyl alcohol.

[0094] In an aspect, a polypeptide is geranylgeranyl diphosphate synthase. In an aspect, a polypeptide is 8-hydroxy-copalyl diphosphate synthase. In an aspect, a polypeptide is cis-abienol synthase. In an aspect, a polypeptide is cembratrienol synthase 2a. In an aspect, a polypeptide is levopimaradiene synthase. In an aspect, a polypeptide is 2-isopropylmalate synthetase. In an aspect, a polypeptide is 2-oxoisovalerate dehydrogenase. In an aspect, a polypeptide is geranyl diphosphate synthase. In an aspect, a polypeptide is limonene synthase. In an aspect, a polypeptide is limonene 3-hydroxylase. In an aspect, a polypeptide is isopiperitenol dehydrogenase. In an aspect, a polypeptide is pulegone reductase. In an aspect, a polypeptide is menthofuran synthase. In an aspect, a polypeptide is neomenthol dehydrogenase. In an aspect, a polypeptide is geranylgeranyl pyrophosphate synthase. In an aspect, a polypeptide is kolavenyl diphosphate synthase. In an aspect, a polypeptide is solanesyl diphosphate synthase. In an aspect, a polypeptide is terpene synthase. In an aspect, a polypeptide is 2-alkenal reductase. In an aspect, a polypeptide is germacrene synthase. In an aspect, a polypeptide is cytochrome P450. In an aspect, a polypeptide is a carveol dehydrogenase. In an aspect, a polypeptide is a MYB61 transcription factor.

[0095] In an aspect, a polypeptide is selected from the group consisting of geranyl diphosphate synthase (GDP), limonene synthase (LS), limonene 3-hydroxylase (L30H), isopiperitenol dehydrogenase (IPD), pulegone reductase, menthofuran synthase, and GGPPS neomenthol dehydrogenase (NtNMD).

[0096] In an aspect, a polypeptide is selected from the group consisting of geranylgeranyl diphosphate synthase (GGPPS2), 8-hydroxy-copalyl diphosphate synthase, and cis-abienol synthase.

[0097] In an aspect, a polypeptide is selected from the group consisting of geranylgeranyl diphosphate synthase, 8-hydroxy-copalyl diphosphate synthase, cis-abienol synthase, cembratrienol synthase 2a, levopimaradiene synthetase, 2-isopropylmalate synthetase, 2-oxoisovalerate dehydrogenase, geranyl diphosphate synthase, limonene synthase, limonene 3-hydroxylase, isopiperitenol dehydrogenase, pulegone reductase, menthofuran synthase, neomenthol dehydrogenase, phylloplanin, and premnaspirodiene oxygenase.

[0098] In an aspect, a polypeptide is selected from the group consisting of geranylgeranyl pyrophosphate synthase, kolavenyl diphosphate synthase, solanesyl diphosphate synthase, terpene synthase, limonene synthase, isopiperitenol dehydrogenase, 2-alkenal reductase, germacrene synthase, 2-isopropylmalate synthase, and MYB61.

[0099] In an aspect, a polypeptide is selected from the group consisting of geranylgeranyl diphosphate synthase, 8-hydroxy-copalyl diphosphate synthase, cis-abienol synthase, cembratrienol synthase 2a, levopimaradiene synthetase, 2-isopropylmalate synthetase, 2-oxoisovalerate dehydrogenase, geranyl diphosphate synthase, limonene synthase, limonene 3-hydroxylase, isopiperitenol dehydrogenase, pulegone reductase, menthofuran synthase, neomenthol dehydrogenase, phylloplanin, premnaspirodiene oxygenase, geranylgeranyl pyrophosphate synthase, kolavenyl diphosphate synthase, solanesyl diphosphate synthase, terpene synthase, 2-alkenal reductase, germacrene synthase, and MYB61.

[0100] As a non-limiting example, SEQ ID NOs: 45 and 3 are representative examples of amino acid and nucleic acid sequences, respectively, for 8-hydroxy-copalyl diphosphate synthase. As a non-limiting example, SEQ ID NOs: 59 and 17 are representative examples of amino acid and nucleic acid sequences, respectively, for cembratrienol synthase 2a. As a non-limiting example, SEQ ID NOs: 60 and 18 are representative examples of amino acid and nucleic acid sequences, respectively, for levopimaradiene synthase. As a non-limiting example, SEQ ID NOs: 61 and 207 are representative examples of amino acid sequences for 2-isopropylmalate synthase. As a non-limiting example, SEQ ID NOs: 61 and 174 are representative examples of nucleic acid sequences for 2-isopropylmalate synthase.

[0101] As a non-limiting example, SEQ ID NOs: 160 and 158 are representative examples of amino acid and nucleic acid sequences, respectively, for premnaspirodiene oxygenase (Gene id g89817). As a non-limiting example, SEQ ID NOs: 157 and 155 are representative examples of amino acid and nucleic acid sequences, respectively, for phylloplanin (Gene id g62191). As a non-limiting example, SEQ ID NOs: 194 and 164 are representative amino acid and nucleic acid sequences, respectively, for a terpene synthase.

[0102] In an aspect, geranylgeranyl diphosphate synthase is a component of the cis-abienol biosynthesis pathway. As a non-limiting example, SEQ ID NOs: 43 and 1 are representative examples of amino acid and nucleic acid sequences, respectively, for geranylgeranyl diphosphate synthase. In an aspect, geranylgeranyl pyrophosphate synthase is a component of the cis-abienol biosynthesis pathway. As a non-limiting example, SEQ ID NOs: 44 and 191 are non-limiting examples of amino acid sequences for geranylgeranyl pyrophosphate synthase. As a non-limiting example, SEQ ID NOs: 2 and 161 are representative examples of nucleic acid sequences for geranylgeranyl pyrophosphate synthase.

[0103] In an aspect, 2-oxoisovalerate dehydrogenase is a component of the L-leucine biosynthesis pathway in plants. As a non-limiting example, SEQ ID NOs: 62 and 20 are representative examples of amino acid and nucleic acid sequences, respectively, for dehydrogenase subunit alpha (Gene id g50844). As a non-limiting example, SEQ ID NOs: 63 and 21 are representative examples of amino acid and nucleic acid sequences, respectively, for 2-oxoisovalerate dehydrogenase subunit alpha (Gene id g63865).

[0104] In an aspect, cis-abienol synthase is a component of the cis-abienol biosynthesis pathway. As a non-limiting example, SEQ ID NOs: 147 and 119 are representative examples of amino acid and nucleic acid sequences, respectively, for cis-abienol synthase. In an aspect, a cis-abienol synthase is selected from the group consisting of cis-abienol synthase ISOFORM1 and cis-abienol synthase ISOFORM 2. In an aspect, a cis-abienol synthase is selected from the group consisting of cis-abienol synthase ISOFORM1, cis-abienol synthase ISOFORM 2, and Ent-kaurene synthase. In an aspect, a cis-abienol synthase is cis-abienol synthase ISOFORM 1. In an aspect, a cis-abienol synthase is cis-abienol synthase ISOFORM 2. In an aspect, cis-abienol synthase is ent-kaurene synthase. As a non-limiting example, SEQ ID NOs: 46 and 4 are representative examples of amino acid and nucleic acid sequences, respectively, for cis-abienol synthase ISOFORM 1. As a non-limiting example, SEQ ID NOs: 47 and 5 are representative examples of amino acid and nucleic acid sequences, respectively, for cis-abienol synthase ISOFORM 2. As a non-limiting example, SEQ ID NOs: 48 and 6 are representative examples of amino acid and nucleic acid sequences, respectively, for ent-kaurene synthase.

[0105] I an aspect, kolavenyl diphosphate synthase catalyzes the first reaction of salvinorin A biosynthesis, which is the formation of (−)-kolavenyl diphosphate ((−)-KPP). (−)-KPP is subsequently dephosphorylated to result in (−)-kolavenol. As a non-limiting example, SEQ ID NOs: 192 and 162 are representative examples of amino acid and nucleic acid sequences, respectively, for kolavenyl diphosphate synthase.

[0106] In an aspect, NAD(P)-dependent oxidoreductases catalyze NADPH-dependent reduction of a wide range of substrates. In an aspect, an oxidoreductase protein contains an oxidoreductase domain. In an aspect, SDR family oxidoreductase shares a conserved oxidoreductase domain with identified [mammalian] carbonyl reductases. In an aspect, an example of a protein containing a SDR family oxidoreductase conserved domain is uncharacterized protein LOC115704491. As a non-limiting example, SEQ ID NOs: 201 and 171 are representative examples of amino acid and nucleic acid sequences, respectively, of uncharacterized protein LOC115704491.

[0107] In an aspect, another example of an enzyme in the oxidoreductase family is 2-alkenal reductase. Substrates of 2-alkenal reductase are n-alkanal, NAD+, and NADP+. 2-alkenal reductase is also called NADPH-dependent alkenal/one oxidoreductase. As a non-limiting example, SEQ ID NOs: 200 and 170 are representative examples of amino acid and nucleic acid sequences, respectively, for 2-alkenal reductase.

[0108] In an aspect, cytochromes P450 (CYP) are a large enzyme family that catalyze the hydroxylation of diverse terpene substrates. In an aspect, premnaspirodiene oxygenase (PSO) (SEQ ID NOs: 158 and 160) catalyzes the hydroxylation of diverse sesquiterpene substrates. Hydroxylation reactions catalyzed by various cytochrome P450s are regio-specific and stereo-specific. As a non-limiting example, SEQ ID NOs: 31-33, 37, 159, 166-168, and 172 are representative examples of nucleic acid sequences for cytochrome P450. As a non-limiting example, SEQ ID NOs: 52-54, 58, 160, 196-198, and 202 are representative examples of amino acid sequences for cytochrome P450.

[0109] In an aspect, germacrene D synthase is a sesquiterpene synthase that catalyzes the formation of germacrene D. In an aspect, a germacrene D synthase is (−)-germacrene D synthase. As a non-limiting example, SEQ ID NOS: 203 and 173 are representative examples of amino acid and nucleic acid sequences, respectively, for (−)-germacrene D synthase.

[0110] In an aspect, a modified plant, seed, or plant part comprising a recombinant nucleic acid provided herein comprises an increased amount of at least one terpene as compared to a control plant, seed, or plant part lacking the recombinant nucleic acid molecule when grown under comparable conditions. In an aspect, a modified tobacco or Cannabis plant, tobacco or Cannabis seed, or tobacco plant part comprising a recombinant nucleic acid provided herein comprises an increased amount of at least one terpene as compared to a control tobacco or Cannabis plant, tobacco or Cannabis seed, or tobacco or Cannabis plant part lacking the recombinant nucleic acid molecule when grown under comparable conditions.

[0111] In an aspect, an increased amount of at least one terpene comprises an increase of at least 0.5%. In an aspect, an increased amount of at least one terpene comprises an increase of at least 1%. In an aspect, an increased amount of at least one terpene comprises an increase of at least 2%. In an aspect, an increased amount of at least one terpene comprises an increase of at least 3%. In an aspect, an increased amount of at least one terpene comprises an increase of at least 4%. In an aspect, an increased amount of at least one terpene comprises an increase of at least 5%. In an aspect, an increased amount of at least one terpene comprises an increase of at least 10%. In an aspect, an increased amount of at least one terpene comprises an increase of at least 12.5%. In an aspect, an increased amount of at least one terpene comprises an increase of at least 15%. In an aspect, an increased amount of at least one terpene comprises an increase of at least 17.5%. In an aspect, an increased amount of at least one terpene comprises an increase of at least 20%. In an aspect, an increased amount of at least one terpene comprises an increase of at least 25%. In an aspect, an increased amount of at least one terpene comprises an increase of at least 30%. In an aspect, an increased amount of at least one terpene comprises an increase of at least 40%. In an aspect, an increased amount of at least one terpene comprises an increase of at least 50%. In an aspect, an increased amount of at least one terpene comprises an increase of at least 60%. In an aspect, an increased amount of at least one terpene comprises an increase of at least 70%. In an aspect, an increased amount of at least one terpene comprises an increase of at least 80%. In an aspect, an increased amount of at least one terpene comprises an increase of at least 90%. In an aspect, an increased amount of at least one terpene comprises an increase of at least 100%. In an aspect, an increased amount of at least one terpene comprises an increase of at least 150%. In an aspect, an increased amount of at least one terpene comprises an increase of at least 200%. In an aspect, an increased amount of at least one terpene comprises an increase of at least 250%. In an aspect, an increased amount of at least one terpene comprises an increase of at least 500%.

[0112] In an aspect, an increased amount of at least one terpene comprises an increase of between 0.5% and 500%. In an aspect, an increased amount of at least one terpene comprises an increase of between 0.5% and 250%. In an aspect, an increased amount of at least one terpene comprises an increase of between 0.5% and 100%. In an aspect, an increased amount of at least one terpene comprises an increase of between 0.5% and 75%. In an aspect, an increased amount of at least one terpene comprises an increase of between 0.5% and 50%. In an aspect, an increased amount of at least one terpene comprises an increase of between 0.5% and 25%. In an aspect, an increased amount of at least one terpene comprises an increase of between 0.5% and 10%. In an aspect, an increased amount of at least one terpene comprises an increase of between 0.5% and 5%. In an aspect, an increased amount of at least one terpene comprises an increase of between 0.5% and 500%. In an aspect, an increased amount of at least one terpene comprises an increase of between 5% and 250%. In an aspect, an increased amount of at least one terpene comprises an increase of between 5% and 100%. In an aspect, an increased amount of at least one terpene comprises an increase of between 5% and 50%. In an aspect, an increased amount of at least one terpene comprises an increase of between 25% and 500%. In an aspect, an increased amount of at least one terpene comprises an increase of between 25% and 250%. In an aspect, an increased amount of at least one terpene comprises an increase of between 50% and 100%. In an aspect, an increased amount of at least one terpene comprises an increase of between 100% and 500%.

[0113] Terpenes may be extracted using any method known in the art, for example, solvent extraction. See, for example, Jiang et al., Curr Protoc Plant Biol., 1:345-358 (2016). Solventless extraction methods are also known in the art. See, for example, Yang and Xie, Science Direct, 162: 135-139 (2006).

[0114] The amount of terpenes in a plant can be measured using any method known in the art, including, without being limiting, gas chromatography mass spectrometry (GC-MS), Nuclear Magnetic Resonance Spectroscopy, and liquid chromatography-linked mass spectrometry. See The Handbook of Plant Metabolomics, edited by Weckwerth and Kahl, (Wiley-Blackwell) (May 28, 2013). In an aspect, an amount of at least one terpene refers to the concentration of that terpene in the tissue sampled.

[0115] In an aspect, a modified tobacco plant or Cannabis plant provided herein further comprises a recombinant nucleic acid molecule comprising a nucleic acid sequence encoding a polypeptide operably linked to a heterologous promoter, where the polypeptide causes an increase in average trichome density as compared to a control tobacco plant or Cannabis plant lacking the transgene or modification when grown under comparable conditions. Non-limiting examples of genes that can be overexpressed to increase average trichome density include NtGIS, NtMYB86, NbGIS, Cannabis MYB61, Cannabis GIS3, and Cannabis non-specific lipid-transfer protein 1-like.

### Cannabinoids

[0116] Cannabinoids are naturally occurring compounds found in Cannabis plants. Many cannabinoids are concentrated in a resin produced in glandular trichomes, and at least 113 cannabinoids are known. Two main cannabinoids are tetrahydrocannabinol (THC) and cannabidiol (CBD), though over 100 additional cannabinoids have been identified. CBD composes approximately 40% of the plant resin extract.

[0117] Cannabinoids exert their effects by interacting with specific cannabinoid receptors. The two main types of cannabinoid receptors in humans are cannabinoid receptor type 1 (CB1) and cannabinoid receptor type 2 (CB2).

[0118] In an aspect, a heterologous polynucleotide is involved in the biosynthesis of a cannabinoid. There are several main classes of natural cannabinoids. Cannabis plant-derived cannabinoids are termed phytocannabinoids. All classes derive from cannabigerol-type (CBG) compounds and differ mainly in the way this precursor is cyclized.

[0119] In an aspect, a cannabinoid is selected from the group consisting of a cannabigerol-type (CBG) cannabinoid, a cannabichromene-type (CBC) cannabinoid, a cannabidiol-type (CBD) cannabinoid, a tetrahydrocannabinol-type (THC) cannabinoid, a cannabinol-type (CBN) cannabinoid, a cannabinodiol-type (CBDL) cannabinoid, a cannabielsoin-type (CBE) cannabinoid, an iso-tetrahydrocannabinol-type (iso-THC) cannabinoid, a cannabicyclol-type (CBL) cannabinoid, and a cannabitriol-type (CBT) cannabinoid.

[0120] Cannabigerol (CBG) is one of the major phytocannabinoids present in Cannabis sativa. CBG is the non-acidic form of cannabigerolic acid, the parent molecule from which other cannabinoids are synthesized. Cannabichromene (CBC) is a non-psychoactive cannabinoid. CBC is also called cannabichrome, cannanbichromene, pentylcannabichromene, or cannabinochromene.

[0121] Cannabidiol (CBD) is a naturally occurring compound found in the resinous flower of Cannabis. CBD is a major phytocannabinoid, accounting for up to 40% of the Cannabis plant's extract, and binds to a wide variety of physiological targets of the endocannabinoid system. Tetrahydrocannabinol (THC) is also known as Delta-9-tetrahydrocannabinol. Some Cannabis plants contain very little THC, and are considered “industrial hemp.”

[0122] Cannabinol (CBN) is a mildly psychoactive cannabinoid found only in trace amounts in Cannabis, and is mostly found in aged Cannabis. THC breaks down into CBN after prolonged periods of time. The degradation of THC to CBN can be accelerated by exposing dried plant matter to oxygen and heat. Cannabinodiol (CBDL) is a fully-aromatized extract of CBD. CBDL is a psychoactive cannabinoid, present in Cannabis sativa at low concentrations.

[0123] Cannabielsoin (CBE) is a non-psychoactive cannabinoid metabolite derived from CBD. Cannabicyclol (CBL) is a non-psychoactive cannabinoid found in Cannabis. Cannabichromene degrades into CBL through natural irradiation or under acidic conditions. Cannabitriol CBT is a cannabinoid that is not always detectable in Cannabis, but when detectable, CBT is often present in low concentrations. CBT is structurally similar to THC. There are currently nine known types of CBT.

[0124] In an aspect, a Cannabis-derived cannabinoid, or a phytocannabinoid, is selected from the group consisting of tetrahydrocannabinol, tetrahydrocannabinolic acid, cannabidiol, cannabidiolic acid, cannabinol, cannabigerol, cannabichromene, cannabicyclol, cannabivarin, tetrahydrocannabivarin, cannabidivarin, cannabichromevarin, cannabigerovarin, cannabigerol monomethyl ether, cannabielsoin, and cannabicitran.

[0125] As used herein, “tetrahydrocannabinol” (“THC”) refers to the organic compound having a chemical formula of C₂₁H₃₀O₂ and the IUPAC name of (−)-(6aR,10aR)-6,6,9-trimethyl-3-pentyl-6a,7,8,10a-tetrahydro-6H-benzo[c]chromen-1-ol.

[0126] As used herein, “tetrahydrocannabinolic acid” (“THCA” or “2-COOH-THC”) refers to the organic compound having a chemical formula of C₂₂H₃₀O₄.

[0127] As used herein, “cannabidiol” (“CBD”) refers to the organic compound having a chemical formula of C₂₁H₃₀O₂, a molecular weight of 314.469 g/mol, and the IUPAC name of 2-[(1R,6R)-3-methyl-6-(prop-1-en-2-yl)cyclohex-2-en-1-yl]-5-pentylbenzene-1,3-diol. It is a 21-carbon terpenophenolic compound, which is formed following decarboxylation from a cannabidiolic acid precursor, although it can also be produced synthetically. CBD is normally taken to refer to the naturally occurring (−)-enantiomer. (+) CBD has been synthesized.

[0128] As used herein, “cannabidiolic acid” (“CBDA”) refers to the organic compound having a chemical formula of C₂₂H₃₀O₄ and the IUPAC name of 2,4-dihydroxy-3-[(1R,6R)-3-methyl-6-prop-1-en-2-ylcyclohex-2-en-1-yl]-6-pentylbenzoic acid.

[0129] In plants, THC and CBD are derived from their acidic precursors THCA and CBDA, respectively, which are both derived from cannabigerolic acid (CBGA). The final biosynthesis step differs, with THCA synthase producing THCA and CBDA synthase producing CBDA, respectively, from CBGA. Subsequent decarboxylation of THCA and CBDA via light exposure, heating, or aging, results in the biosynthesis of THC or CBD. THCA synthase catalyzes oxidative cyclization of the monoterpene moiety of CBGA to form THCA. CBDA synthase catalyze oxidative cyclization of the monoterpene moiety of CBGA to form CBDA. THC is generated from THCA by non-enzymatic decarboxylation. CBD is generated from CBDA by non-enzymatic decarboxylation.

[0130] As used herein, “cannabinol” refers to the organic compound having a chemical formula of C₂₁H₂₆O₂ and the IUPAC name of 6,6,9-trimethyl-3-pentylbenzo[c]chromen-1-ol.

[0131] As used herein, “cannabigerol” refers to the organic compound having a chemical formula of C₂₁H₃₂O₂ and the IUPAC name of 2-[(2E)-3,7-dimethylocta-2,6-dienyl]-5-pentylbenzene-1,3-diol.

[0132] As used herein, “cannabichromene” refers to the organic compound having a chemical formula of C₂₁H₃₀O₂ and the IUPAC name of 2-methyl-2-(4-methylpent-3-enyl)-7-pentylchromen-5-ol.

[0133] As used herein, “cannabicyclol” refers to the organic compound having a chemical formula of C₂₁H₃₀O₂ and the IUPAC name of 9,13,13-trimethyl-5-pentyl-8-oxatetracyclo[7.4.1.0.0]tetradeca-2,4,6-trien-3-ol.

[0134] As used herein, “cannabivarin” refers to the organic compound having a chemical formula of C₁₉H₂₂O₂ and the IUPAC name of 6,6,9-trimethyl-3-propylbenzo[c]chromen-1-ol.

[0135] As used herein, “tetrahydrocannabivarin” refers to the organic compound having a chemical formula of C₁₉H₂₆O₂ and the IUPAC name of (6aR,10aR)-6,6,9-trimethyl-3-propyl-6a,7,8,10a-tetrahydrobenzo[c]chromen-1-ol.

[0136] As used herein, “cannabidivarin” refers to the organic compound having a chemical formula of C₁₉H₂₆O₂ and the IUPAC name of 2-[(1R,6R)-3-methyl-6-prop-1-en-2-ylcyclohex-2-en-1-yl]-5-propylbenzene-1,3-diol.

[0137] As used herein, “cannabichromevarin” refers to the organic compound having a chemical formula of C₁₉H₂₆O₂ and the IUPAC name of 2-methyl-2-(4-methylpent-3-enyl)-7-propylchromen-5-ol.

[0138] As used herein, “cannabigerovarin” refers to the organic compound having a chemical formula of C₁₉H₂₈O₂ and the IUPAC name of 2-[(2E)-3,7-dimethylocta-2,6-dienyl]-5-propylbenzene-1,3-diol.

[0139] As used herein, “cannabigerol monomethyl ether” refers to the organic compound having a chemical formula of C₂₂H₂₈O₂ and the IUPAC name of 1-methoxy-6,6,9-trimethyl-3-pentylbenzo[c]chromene.

[0140] As used herein, “cannabielsoin” refers to the organic compound having a chemical formula of C₂₁H₃₀O₃ and the IUPAC name of (5aS,6S,9R,9aR)-6-methyl-3-pentyl-9-prop-1-en-2-yl-7,8,9,9a-tetrahydro-5aH-dibenzofuran-1,6-diol.

[0141] As used herein, “cannabicitran” refers to the organic compound having a chemical formula of C₂₁H₃₀O₂ and the IUPAC name of 1,5,5-trimethyl-9-pentyl-6,15-dioxatetracyclo[9.3.1.0.0]pentadeca-7(12),8,10-triene.

### Promoters

[0142] As commonly understood in the art, the term “promoter” refers to a DNA sequence that contains an RNA polymerase binding site, a transcription start site, and/or a TATA box and assists or promotes the transcription and expression of an associated transcribable polynucleotide sequence and/or gene (or transgene). A promoter can be synthetically produced, varied, or derived from a known or naturally occurring promoter sequence or other promoter sequence. A promoter can also include a chimeric promoter comprising a combination of two or more heterologous sequences. A promoter of the present application can thus include variants of promoter sequences that are similar in composition, but not identical to, other promoter sequence(s) known or provided herein.

[0143] In one aspect, this disclosure provides a recombinant nucleic acid molecule comprising a nucleic acid sequence encoding a polypeptide involved in the biosynthesis of at least one terpene operably linked to a heterologous promoter. In one aspect, this disclosure provides a recombinant nucleic acid molecule comprising a nucleic acid sequence encoding a polypeptide involved in the biosynthesis of at least one terpene operably linked to a heterologous promoter. In one aspect, this disclosure provides a recombinant nucleic acid molecule comprising a nucleic acid sequence encoding a polypeptide involved in the biosynthesis of at least one terpene operably linked to a heterologous promoter.

[0144] It is appreciated in the art that a fragment of a promoter sequence can function to drive transcription of an operably linked nucleic acid molecule. For example, without being limiting, if a 1000 bp promoter is truncated to 500 bp, and the 500 bp fragment is capable of driving transcription, the 500 bp fragment is referred to as a “functional fragment.”

[0145] In an aspect, a heterologous promoter comprises a nucleic acid sequence at least 90% identical to SEQ ID NOs: 104-111, 206-208, or a functional fragment thereof. In an aspect, a heterologous promoter comprises a nucleic acid sequence at least 92.5% identical to SEQ ID NOs: 104-111, 206-208, or a functional fragment thereof. In an aspect, a heterologous promoter comprises a nucleic acid sequence at least 95% identical to SEQ ID NOs: 104-111, 206-208, or a functional fragment thereof. In an aspect, a heterologous promoter comprises a nucleic acid sequence at least 96% identical to SEQ ID NOs: 104-111, 206-208, or a functional fragment thereof. In an aspect, a heterologous promoter comprises a nucleic acid sequence at least 97% identical to SEQ ID NOs: 104-111, 206-208, or a functional fragment thereof. In an aspect, a heterologous promoter comprises a nucleic acid sequence at least 98% identical to SEQ ID NOs: 104-111, 206-208, or a functional fragment thereof. In an aspect, a heterologous promoter comprises a nucleic acid sequence at least 99% identical to SEQ ID NOs: 104-111, 206-208, or a functional fragment thereof. In an aspect, a heterologous promoter comprises a nucleic acid sequence at least 99.9% identical to SEQ ID NOs: 104-111, 206-208, or a functional fragment thereof. In an aspect, a heterologous promoter comprises a nucleic acid sequence 100% identical to SEQ ID NOs: 104-111, 206-208, or a functional fragment thereof.

[0146] Promoters that drive expression in all or most tissues of the plant are referred to as “constitutive” promoters. In an aspect, a constitutive promoter is selected from the group consisting of a Cauliflower Mosaic Virus 35S promoter, a ubiquitin promoter, an actin promoter, an opine promoter, glyceraldehyde 3-phosphate dehydrogenase (GAPDH), and an alcohol dehydrogenase promoter.

[0147] Promoters that drive expression during certain periods or stages of development are referred to as “developmental” promoters.

[0148] Promoters that drive enhanced expression in certain tissues of an organism relative to other tissues of the organism are referred to as “tissue-preferred” promoters. Thus, a “tissue-preferred” promoter causes relatively higher or preferential expression in a specific tissue(s) of a plant, but with lower levels of expression in other tissue(s) of the plant. As a non-limiting example, a trichome tissue-preferred promoter exhibits higher activity in trichomes, but may also exhibit activity, albeit at lower levels, in additional tissues such as stem, leaves, and floral tissues. A “tissue-specific” promoter causes expression only in a specific tissue. As a non-limiting example, a trichome tissue-specific promoter drives expression only in trichomes. In an aspect, a tissue-specific promoter is a trichome tissue-specific promoter. In another aspect, a tissue-preferred promoter is a trichome tissue-preferred promoter.

[0149] In an aspect, a promoter is selected from the group consisting of a cyclase promoter, a premnaspirodiene oxygenase (PSO) promoter, and a ribulose biphosphate carboxylase promoter.

[0150] In an aspect, this disclosure provides a modified tobacco plant, tobacco seed, or part thereof, where a tissue-preferred promoter comprises a trichome-preferred promoter. In an aspect, this disclosure provides a modified tobacco plant, tobacco seed, or part thereof, where a tissue-specific promoter comprises a trichome-specific promoter. In an aspect, this disclosure provides a modified tobacco plant, tobacco seed, or part thereof where a tissue-preferred promoter or tissue-specific promoter comprises a trichome-preferred promoter or a trichome-specific promoter. In an aspect, a trichome-specific promoter sequence is selected from the group consisting of SEQ ID NOs: 104-111 and 206-208. In an aspect, a trichome-preferred promoter sequence is selected from the group consisting of SEQ ID NOs: 104-111 and 206-208.

[0151] An “inducible” promoter is a promoter that initiates transcription in response to an environmental stimulus such as heat, cold, drought, light, or other stimuli, such as wounding or chemical application.

[0152] In an aspect, a promoter provided herein is a constitutive promoter. In another aspect, a promoter provided herein is an inducible promoter. In a further aspect, a promoter provided herein is a developmental promoter. In another aspect, a promoter is a tissue-preferred or tissue-specific promoter. In a further aspect, a promoter is selected from the group consisting of a constitutive promoter, a tissue-preferred promoter, a tissue-specific promoter, and an inducible promoter.

[0153] In an aspect, this disclosure provides a heterologous promoter. In another aspect, this disclosure provides a promoter that is operably linked to a heterologous polynucleotide. In another aspect, this disclosure provides a polynucleotide sequence that is operably linked to a heterologous promoter.

[0154] As used herein, “operably linked” refers to a functional linkage between two or more elements. For example, an operable linkage between a polynucleotide of interest and a regulatory sequence (e.g., a promoter) is a functional link that allows for expression of the polynucleotide of interest. Operably linked elements may be contiguous or non-contiguous. In an aspect, a promoter provided herein is operably linked to a heterologous nucleic acid molecule.

### Plants

[0155] In an aspect, this disclosure provides a modified tobacco or Cannabis plant, tobacco or Cannabis seed, or part thereof comprising a recombinant nucleic acid molecule comprising a nucleic acid sequence encoding a polypeptide involved in the biosynthesis of at least one terpene operably linked to a heterologous promoter.

[0156] In an aspect, this disclosure provides a modified tobacco or Cannabis plant, tobacco or Cannabis seed, or part thereof comprising at least one non-natural mutation in an endogenous gene encoding a polypeptide involved in the biosynthesis of at least one terpene, where the modified tobacco or Cannabis plant exhibits increased mRNA expression of the endogenous gene or increased accumulation of the polypeptide as compared to a control tobacco or Cannabis plant lacking the at least one non-natural mutation when grown under comparable conditions.

[0157] In an aspect, a plant provided herein is a modified plant. In an aspect, a seed provided herein is a modified seed. In an aspect, a plant part provided herein is a modified plant part. As used herein, “modified,” in the context of a plant, seed, or plant part, refers to a plant, seed, or plant part, comprising a genetic alteration introduced for certain purposes and beyond natural polymorphisms. Without being limiting, a modified plant, seed, or plant part comprises a recombinant nucleic acid molecule. In another aspect, a modified plant, seed, or plant part comprises a genetic modification. In an aspect, a modified plant, seed, or plant part is transgenic.

[0158] Cannabis cultivars range from plants grown to produce Cannabis for recreational purposes to plants produced to use hemp fiber derived from the stems of the plant (e.g., industrial hemp). In cultivars utilized for recreational purposes, THC quantity exceeds CBD quantity in the dried female inflorescences used for smoking and oral administration. Industrial hemp cultivars produce substantially lower levels of THC and higher levels of CBD.

[0159] The plant genus Cannabis encompasses the species C. sativa, C. indica, and C. ruderalis. Another classification scheme applied to Cannabis is a chemotaxonomic classification system. There are five chemotaxonomic types of Cannabis: one with high levels of THC, one with high levels of CBD, one that has similar levels of THC and CBD, one with high levels of CBG, and one with low to no detectable cannabinoids.

[0160] In addition to genetic characteristics, cultivated Cannabis plants are influenced by environmental conditions and production technology during their life cycle. A study evaluating the effects of ambient temperature and humidity, soil temperature and precipitation on the content of THC and CBD in industrial hemp noted that these agroclimatic conditions have differing effects on THC and CBD. For example, CBD content is positively affected by soil temperature and ambient temperature, but negatively influenced by precipitation. See, for example, Sikora, V., et al., 2011, Genetika, 43(3):449-456.

[0161] In an aspect, a plant is a tobacco plant. In an aspect, a plant is a Nicotiana plant. In an aspect, a tobacco plant is a Nicotiana tabacum plant.

[0162] In an aspect, a Nicotiana plant, seed, or plant part is selected from the group consisting of Nicotiana tabacum, Nicotiana amplexicaulis PI 271989; Nicotiana benthamiana PI 555478; Nicotiana bigelovii PI 555485; Nicotiana debneyi; Nicotiana excelsior PI 224063; Nicotiana glutinosa PI 555507; Nicotiana goodspeedii PI 241012; Nicotiana gossei PI 230953; Nicotiana hesperis PI 271991; Nicotiana knightiana PI 555527; Nicotiana maritima PI 555535; Nicotiana megalosiphon PI 555536; Nicotiana nudicaulis PI 555540; Nicotiana paniculata PI 555545; Nicotiana plumbaginfolia PI 555548; Nicotiana repanda PI 555552; Nicotiana rustica; Nicotiana suaveolens PI 230960; Nicotiana sylvestris PI 555569; Nicotiana tomentosa PI 266379; Nicotiana tomentosiformis; and Nicotiana trigonophylla PI 555572.

[0163] In an aspect, a plant is a Cannabis plant. In an aspect, a plant is a Cannabis plant. In an aspect, a Cannabis plant is a Cannabis sativa plant. In an aspect, a Cannabis plant is a Cannabis indica plant. In an aspect, a Cannabis plant is a Cannabis ruderalis plant. In an aspect, a Cannabis plant is selected from the group consisting of Cannabis sativa, Cannabis indica, and Cannabis ruderalis.

[0164] In an aspect, a Cannabis plant may be placed into chemotype or chemotaxonomic grouping based on ratios of THC/CBD. In an aspect, a ratio of THC/CBD is based on relative levels of THC and CBD within a given Cannabis plant. A Cannabis plant with a THC/CBD ratio of greater than 1.0 has a high level of THC. A Cannabis plant with a THC/CBD ratio of approximately 1.0 has similar levels of THC and CBD. A Cannabis plant with a THC/CBD ratio of less than 1.0 has a high level of CBD.

[0165] In an aspect, a Cannabis plant is placed within a chemotaxonomic type comprising high levels of THC, relative to other assessed cannabinoids. In an aspect, a Cannabis plant is placed within a chemotaxonomic type comprising high levels of CBD, relative to other assessed cannabinoids. In an aspect, a Cannabis plant is placed within a chemotaxonomic type comprising similar levels of THC and CBD. In an aspect, a Cannabis plant is placed within a chemotaxonomic type comprising high levels of CBG, relative to other assessed cannabinoids. In an aspect, a Cannabis plant is placed within a chemotaxonomic type comprising low to no detectable cannabinoids.

[0166] In an aspect, a Cannabis plant, plant part, or seed comprises low to no detectable levels of THC. In an aspect, a Cannabis plant, plant part, or seed comprises low to no detectable levels of CBD. In an aspect, a Cannabis plant, plant part, or seed comprises low to no detectable levels of CBG.

[0167] In an aspect, a seed is a tobacco seed. In an aspect, a seed is a Nicotiana seed. In an aspect, a tobacco seed is a Nicotiana tabacum seed.

[0168] In an aspect, a seed is a Cannabis seed. In an aspect, a seed is a Cannabis seed. In an aspect, a Cannabis seed is a Cannabis sativa seed. In an aspect, a Cannabis seed is a Cannabis indica seed. In an aspect, a Cannabis seed is a Cannabis ruderalis seed. In an aspect, a Cannabis seed is selected from the group consisting of Cannabis sativa, Cannabis indica, and Cannabis ruderalis.

[0169] In an aspect, a Cannabis seed is placed within a chemotaxonomic type comprising high levels of THC, relative to other assessed cannabinoids. In an aspect, a Cannabis seed is placed within a chemotaxonomic type comprising high levels of CBD, relative to other assessed cannabinoids. In an aspect, a Cannabis seed is placed within a chemotaxonomic type comprising similar levels of THC and CBD. In an aspect, a Cannabis seed is placed within a chemotaxonomic type comprising high levels of CBG, relative to other assessed cannabinoids. In an aspect, a Cannabis seed is placed within a chemotaxonomic type comprising low to no detectable cannabinoids.

[0170] In an aspect, a plant part is a tobacco plant part. In an aspect, a plant part is a Nicotiana plant part. In an aspect, a tobacco plant part is a Nicotiana tabacum plant part.

[0171] In an aspect, a plant part is a Cannabis plant part. In an aspect, a plant part is a Cannabis plant part. In an aspect, a Cannabis plant part is a Cannabis sativa plant part. In an aspect, a Cannabis plant part is a Cannabis indica plant part. In an aspect, a Cannabis plant part is a Cannabis ruderalis plant part. In an aspect, a Cannabis plant part is selected from the group consisting of Cannabis sativa, Cannabis indica, and Cannabis ruderalis.

[0172] In an aspect, a Cannabis plant part is placed within a chemotaxonomic type comprising high levels of THC, relative to other assessed cannabinoids. In an aspect, a Cannabis plant part is placed within a chemotaxonomic type comprising high levels of CBD, relative to other assessed cannabinoids. In an aspect, a Cannabis plant part is placed within a chemotaxonomic type comprising similar levels of THC and CBD. In an aspect, a Cannabis plant part is placed within a chemotaxonomic type comprising high levels of CBG, relative to other assessed cannabinoids. In an aspect, a Cannabis plant part is placed within a chemotaxonomic type comprising low to no detectable cannabinoids.

[0173] In an aspect, a plant part provided includes, but is not limited to, a leaf, a stem, a root, a trichome, a seed, a flower, pollen, an anther, an ovule, a pedicel, a fruit, a meristem, a cotyledon, a hypocotyl, a pod, an embryo, endosperm, an explant, a callus, a tissue culture, a shoot, a cell, and a protoplast. In an aspect, a plant part does not include a seed. In an aspect, this disclosure provides plant cells, tissues, and organs that are not reproductive material and do not mediate the natural reproduction of the plant. In another aspect, this disclosure also provides plant cells, tissues, and organs that are reproductive material and mediate the natural reproduction of the plant. In another aspect, this disclosure provides plant cells, tissues, and organs that cannot maintain themselves via photosynthesis. In another aspect, this disclosure provides somatic plant cells. Somatic cells, contrary to germline cells, do not mediate plant reproduction.

[0174] Cells, tissues and organs can be from seed, fruit, leaf, cotyledon, hypocotyl, meristem, embryos, endosperm, root, shoot, stem, trichome, pod, flower, inflorescence, stalk, pedicel, style, stigma, receptacle, petal, sepal, pollen, anther, filament, ovary, ovule, pericarp, phloem, vascular tissue. In another aspect, this disclosure provides a plant chloroplast. In a further aspect, this disclosure provides epidermal cells, stomata cell, leaf or root hairs, a storage root, or a tuber. In another aspect, this disclosure provides a tobacco protoplast. In another aspect, this disclosure provides a Cannabis protoplast.

[0175] Skilled artisans understand that tobacco and Cannabis plants naturally reproduce via seeds, not via asexual reproduction or vegetative propagation. In an aspect, this disclosure provides plant endosperm.

[0176] This disclosure provides cells from plants provided herein.

[0177] As used herein, a “progeny plant” or “progeny seed” can be from any filial generation, e.g., F₁, F₂, F₃, F₄, F₅, F₆, F₇, etc.

[0178] In an aspect, a tobacco plant, seed, or plant part, is of a tobacco variety selected from the group consisting of a flue-cured variety, a bright variety, a Burley variety, a Virginia variety, a Maryland variety, a dark variety, a Galpão variety, an Oriental variety, and a Turkish variety.

[0179] In an aspect, a tobacco cell is of a tobacco variety selected from the group consisting of a flue cured variety, a bright variety, a Burley variety, a Virginia variety, a Maryland variety, a dark variety, a Galpão variety, an Oriental variety, and a Turkish variety.

[0180] In an aspect, a tobacco leaf is of a tobacco variety selected from the group consisting of a flue cured variety, a bright variety, a Burley variety, a Virginia variety, a Maryland variety, a dark variety, a Galpão variety, an Oriental variety, and a Turkish variety.

[0181] In an aspect, a cured tobacco leaf or plant part is of a tobacco variety selected from the group consisting of a flue cured variety, a bright variety, a Burley variety, a Virginia variety, a Maryland variety, a dark variety, a Galpão variety, an Oriental variety, and a Turkish variety. Skilled artisans further understand that cured tobacco does not constitute a living organism and is not capable of growth or reproduction

[0182] Flue-cured tobaccos (also called “Virginia” or “bright” tobaccos) amount to approximately 40% of world tobacco production. Flue-cured tobaccos are often also referred to as “bright tobacco” because of the golden-yellow to deep-orange color it reaches during curing. Flue-cured tobaccos have a light, bright aroma and taste. Flue-cured tobaccos are generally high in sugar and low in oils. Major flue-cured tobacco growing countries are Argentina, Brazil, China, India, Tanzania and the United States of America. In one aspect, tobacco plants, seeds, or plant parts provided herein are of a flue-cured tobacco variety selected from the group consisting of the varieties listed in Table 2, and any variety essentially derived from any one of the foregoing varieties. See WO 2004/041006 A1. In a further aspect, tobacco plants, seeds, or plant parts provided herein are in a flue-cured variety selected from the group consisting of K326, K346, and NC196.

TABLE 2
Flue-cured Tobacco Varieties

400 (TC 225)
401 (TC 226)
401 Cherry Red (TC 227)
401 Cherry Red Free (TC 228)
Cash (TC 250)
Cash (TI 278)
CC 101
CC 1063
CC 13
CC 143
CC 200
CC 27
CC 301
CC 33
CC 35
CC 37
CC 400
CC 500
CC 600
CC 65
CC 67
CC 700
CC 800
CC 900
Coker 139 (TC 259)
Coker 139 ybl, yb2
Coker 140 (TC 260)
Coker 176 (TC 262)
Coker 187 (TC 263)
Coker 187-Hicks (TC 265)
Coker 209 (TC 267)
Coker 258 (TC 270)
Coker 298 (TC 272)
Coker 316 (TC 273)
Coker 319 (TC 274)
Coker 347 (TC 275)
Coker 371-Gold (TC 276)
Coker 411 (TC 277)
Coker 48 (TC 253)
Coker 51 (TC 254)
Coker 86 (TC 256)
CU 263 (TC 619)
CU 561
DH95-1562-1
Dixie Bright 101 (TC 290)
Dixie Bright 102 (TC 291)
Dixie Bright 244 (TC 292)
Dixie Bright 27 (TC 288)
Dixie Bright 28 (TC 289)
GF 157
GF 318
GL 26H
GL 338
GL 350
GL 368
GL 395
GL 600
GL 737
GL 939
GL 939 (TC 628)
Hicks (TC 310)
Hicks Broadleaf (TC 311)
K 149 (TC 568)
K 317
K 326
K 326 (TC 319)
K 340 (TC 320)
K 346
K 346 (TC 569)
K 358
K 394 (TC 321)
K 399
K 399 (TC 322)
K 730
Lonibow (TI 1573)
Lonibow (TI 1613)
McNair 10 (TC 330)
McNair 135 (TC 337)
McNair 30 (TC 334)
McNair 373 (TC 338)
McNair 944 (TC 339)
MK94 (TI 1512)
MS K 326
MS NC 71
MS NC 72
NC 100
NC 102
NC 1071 (TC 364)
NC 1125-2
NC 12 (TC 346)
NC 1226
NC 196
NC 2326 (TC 365)
NC 27 NF (TC 349)
NC 291
NC 297
NC 299
NC 37 NF (TC 350)
NC 471
NC 55
NC 567 (TC 362)
NC 60 (TC 352)
NC 606
NC 6140
NC 71
NC 72
NC 729 (TC 557)
NC 810 (TC 659)
NC 82 (TC 356)
NC 8640
NC 89 (TC 359)
NC 92
NC 925
NC 95 (TC 360)
NC 98 (TC 361)
NC EX 24
NC PY 10 (TC 367)
NC TG 61
Oxford 1 (TC 369)
Oxford 1-181 (TC 370)
Oxford 2 (TC 371)
Oxford 207 (TC 632)
Oxford 26 (TC 373)
Oxford 3 (TC 372)
Oxford 414 NF
PD 611 (TC 387)
PVH 03
PVH 09
PVH 1118
PVH 1452
PVH 1600
PVH 2110
PVH 2275
R 83 (Line 256-1) (TI 1400)
Reams 134
Reams 158
Reams 713
Reams 744
Reams M1
RG 11 (TC 600)
RG 13 (TC 601)
RG 17 (TC 627)
RG 22 (TC 584)
RG 8 (TC 585)
RG 81 (TC 618)
RG H51
RG4H 217
RGH 12
RGH 4
RGH 51
RGH 61
SC 58 (TC 400)
SC 72 (TC 403)
Sp. G-168
SPEIGHT 168
Speight 168 (TC 633)
Speight 172 (TC 634)
Speight 178
Speight 179
Speight 190
Speight 196
SPEIGHT 220
SPEIGHT 225
SPEIGHT 227
SPEIGHT 236
Speight G-10 (TC 416)
Speight G-102
Speight G-108
Speight G-111
Speight G-117
Speight G-126
Speight G-15 (TC 418)
Speight G-23
Speight G-28 (TC 420)
Speight G-33
Speight G-41
Speight G-5
Speight G-52
Speight G-58
Speight G-70
Speight G-70 (TC 426)
Speight G-80 (TC 427)
Speight NF3 (TC 629)
STNCB
VA 182
VA 45 (TC 559)
Vesta 30 (TC 439)
Vesta 33 (TC 440)
Vesta 5 (TC 438)
Vesta 62 (TC 441)
Virginia (TI 220)
Virginia (TI 273)
Virginia (TI 877)
Virginia 115 (TC 444)
Virginia 21 (TC 443)
Virginia Bright (TI 964)
Virginia Bright Leaf (TC 446)
Virginia Gold (TC 447)
White Stem Orinoco (TC 451)

[0183] Air-cured tobaccos include “Burley,” Maryland,” and “dark” tobaccos. The common factor linking air-cured tobaccos is that curing occurs primarily without artificial sources of heat and humidity. Burley tobaccos are light to dark brown in color, high in oil, and low in sugar. Burley tobaccos are typically air-cured in barns. Major Burley growing countries include Argentina, Brazil, Italy, Malawi, and the United States of America.

[0184] Maryland tobaccos are extremely fluffy, have good burning properties, low nicotine and a neutral aroma. Major Maryland growing countries include the United States of America and Italy.

[0185] In one aspect, tobacco plants, seeds, or plant parts provided herein are of a Burley tobacco variety selected from the group consisting of the tobacco varieties listed in Table 3, and any variety essentially derived from any one of the foregoing varieties. In a further aspect, tobacco plants, seeds, or plant parts provided herein are in a Burley variety selected from the group consisting of TN 90, KT 209, KT 206, KT212, and 89 4488.

TABLE 3
Burley Tobacco Varieties

4407 LC
AA-37-1
Burley 21 (TC 7)
Burley 49 (TC 10)
Burley 64 (TC 11)
Burley Mammoth KY 16 (TC 12)
Clay 402
Clay 403
Clay 502
Clays 403
GR 10 (TC 19)
GR 10 (TC 19)
GR10A (TC 20)
GR 13 (TC 21)
GR 14 (TC 22)
GR 149 LC
GR 153
GR 17 (TC 23)
GR 17B (TC 24)
GR 18 (TC 25)
GR 19 (TC 26)
GR 2 (TC 15)
GR 24 (TC 27)
GR 36 (TC 28)
GR 38 (TC 29)
GR 38A (TC 30)
GR 40 (TC 31)
GR 42 (TC 32)
GR 42C (TC 33)
GR 43 (TC 34)
GR 44 (TC 35)
GR 45 (TC 36)
GR 46 (TC 37)
GR 48 (TC 38)
GR 5 (TC 16)
GR 53 (TC 39)
GR 6 (TC 17)
GR 9 (TC 18)
GR139 NS
GR139 S
HB 04P
HB 04P LC
HB 3307P LC
HB 4108P
HB 4151P
HB 4192P
HB 4194P
HB 4196
HB 4488
HB 4488P
HB04P
HB 4488 LC
HIB 21
HPB 21
HY 403
Hybrid 403 LC
Hybrid 404 LC
Hybrid 501 LC
KDH-959 (TC 576)
KDH-960 (TC 577)
KT 200 LC
KT 204 LC
KT 206 LC
KT 209 LC
KT 210 LC
KT 212 LC
KT 215 LC
KY 1 (TC 52)
KY 10 (TC 55)
KY 12 (TC 56)
KY 14 (TC 57)
KY 14 x L8 LC
KY 15 (TC 58)
KY 16 (TC 59)
KY 17 (TC 60)
KY 19 (TC 61)
KY 21 (TC 62)
KY 22 (TC 63)
KY 24 (TC 64)
KY 26 (TC 65)
KY 33 (TC 66)
KY 34 (TC 67)
KY 35 (TC 68)
KY 41A (TC 69)
KY 5 (TC 53)
KY 52 (TC 70)
KY 54 (TC 71)
KY 56 (TC 72)
KY 56 (TC 72)
KY 57 (TC 73)
KY 58 (TC 74)
KY 8654 (TC 77)
KY 8959
KY 9 (TC 54)
KY 907 LC
KY 908 (TC 630)
NBH 98 (Screened)
NC 1206
NC 129
NC 2000 LC
NC 2002 LC
NC 3 LC
NC 5 LC
NC 6 LC
NC 7 LC
NC BH 129 LC
NC03-42-2
Newton 98
R 610 LC
R 630 LC
R 7-11
R 7-12 LC
RG 17
TKF 1801 LC
TKF 2002 LC
TKF 4024 LC
TKF 4028 LC
TKF 6400 LC
TKF 7002 LC
TKS 2002 LC
TN 86 (TC 82)
TN 90 LC
TN 97 Hybrid LC
TN 97 LC
VA 116
VA 119
Virgin A Mutante (TI 1406)
Virginia 509 (TC 84)

[0186] In another aspect, tobacco plants, seeds, or plant parts provided herein are of a Maryland tobacco variety selected from the group consisting of the tobacco varieties listed in Table 4, and any variety essentially derived from any one of the foregoing varieties.

TABLE 4
Maryland Tobacco Varieties

Maryland 10 (TC 498)
Maryland 14 D2 (TC 499)
Maryland 201 (TC 503)
Maryland 21 (TC 500)
Maryland 341 (TC 504)
Maryland 40
Maryland 402
Maryland 59 (TC 501)
Maryland 601
Maryland 609 (TC 505)
Maryland 64 (TC 502)
Maryland 872 (TC 506)
Maryland Mammoth (TC 507)

[0187] Dark air-cured tobaccos are distinguished from other tobacco types primarily by its curing process, which gives dark air-cured tobacco its medium-brown to dark-brown color and a distinct aroma. Dark air-cured tobaccos are mainly used in the production of chewing tobacco and snuff. In one aspect, tobacco plants, seeds, or plant parts provided herein are of a dark air-cured tobacco variety selected from the group consisting of Sumatra, Jatim, Dominican Cubano, Besuki, One sucker, Green River, Virginia sun-cured, and Paraguan Passado, and any variety essentially derived from any one of the foregoing varieties.

[0188] Dark fire-cured tobaccos are generally cured with low-burning wood fires on the floors of closed curing barns. Dark fire-cured tobaccos are typically used for making pipe blends, cigarettes, chewing tobacco, snuff, and strong-tasting cigars. Major growing regions for dark fire-cured tobaccos are Tennessee, Kentucky, and Virginia in the United States of America. In one aspect, tobacco plants, seeds, or plant parts provided herein are of a dark fire-cured tobacco variety selected from the group consisting of the tobacco varieties listed in Table 5, and any variety essentially derived from any one of the foregoing varieties.

TABLE 5
Dark Fire-Cured Tobacco Varieties

Black Mammoth (TC 461)
Black Mammoth Small Stalk (TC 641)
Certified Madole (TC 463)
D-534-A-1 (TC 464)
DAC ULT 302
DAC ULT 303
DAC ULT 306
DAC ULT 308
DAC ULT 312
DF 300 (TC 465)
DF 485 (TC 466)
DF 516 (TC 467)
DF 911 (TC 468)
DT 508
DT 518 (Screened)
DT 538 LC
DT 592
Improved Madole (TC 471)
Jernigan's Madole (TC 472)
KT 14LC
KT D17LC
KT D4 LC
KT D6 LC
KT D8 LC
KY 153 (TC 216)
KY 157 (TC 217)
KY 160
KY 160 (TC 218)
KY 163 (TC 219)
KY 165 (TC 220)
KY 170 (TC 474)
KY 171 (PhPh)
KY 171 (TC 475)
KY 171 LC
KY 171 NS
KY 180 (TC 573)
KY 190 (TC 574)
Little Crittenden
Little Crittenden (TC 476)
Little Crittenden LC
(certified)
Little Crittenden PhPh
Lizard Tail Turtle Foot TN D94
Madole (TC 478)
Madole (TC 479)
MS KY 171
MS NL Madole LC
MS TN D950 LC
Nance (TC 616)
Narrow Leaf Madole LC
(certified)
Neal Smith Madole (TC 646)
Newtons VH Madole
NL Madole
NL Madole (PhPh)
NL Madole (TC 484)
NL Madole LC
NL Madole LC (PhPh)
NL Madole NS
One Sucker (TC 224)
OS 400
PD 302H
PD 312H
PD 318H
PD 7302 LC
PD 7305
PD 7309 LC
PD 7312 LC
PD 7318 LC
PD 7319 LC
Petico M PG04
PY KY 160 (TC 612)
PY KY 171 (TC 613)
Shirey
TI 1372
TN D94 (TC 621)
TN D950
TN D950 (PhPh)
TN D950
TN D950 (TC 622)
TR Madole (TC 486)
VA 309
VA 309 (TC 560)
VA 309 LC (certified)
VA 310 (TC 487)
VA 331 (TC 592)
VA 355 (TC 638)
VA 359
VA 359 (Screened)
VA 359 (TC 639)
VA 359 LC (certified)
VA 403 (TC 580)
VA 405 (TC 581)
VA 409 (TC 562)
VA 510 (TC 572)

[0189] Oriental tobaccos are also referred to as Greek, aroma and Turkish tobaccos due to the fact that they are typically grown in eastern Mediterranean regions such as Turkey, Greece, Bulgaria, Macedonia, Syria, Lebanon, Italy, and Romania. The small plant size, small leaf size, and unique aroma properties of Oriental tobacco varieties are a result of their adaptation to the poor soil and stressful climatic conditions in which they have been developed. In one aspect, tobacco plants, seeds, or plant parts provided herein are of an Oriental tobacco variety selected from the group consisting of the tobacco varieties listed in Table 6, and any variety essentially derived from any one of the foregoing varieties.

TABLE 6
Oriental Tobacco Varieties

Bafra (TI 1641)
Bahce (TI 1730)
Bahia (TI 1416)
Bahia (TI 1455)
Baiano (TI 128)
Basma
Basma (TI 1666)
Basma Drama
Basma Hybrid (PhPh)
Basma Zihna I
Bitlis (TI 1667)
Bitlis (TI 1725)
Bubalovac (TI 1282)
Bursa (TI 1650)
Bursa (TI 1668)
Canik (TI 1644)
Djebel 174 (TI 1492)
Djebel 359 (TI 1493)
Djebel 81
Dubec 566 (TI 1409)
Dubec 7 (TI 1410)
Dubek 566 (TI 1567)
Duzce (TI 1670)
Edirne (TI 1671)
Ege (TI 1642)
Ege-64 (TI 1672)
Izmir (Akhisar) (TI 1729)
Izmir (Gavurkoy) (TI 1727)
Izmir Ege 64
Izmir-Incekara (TI 1674)
Izmir-Ozbas (TI 1675)
Jaka Dzebel (TI 1326)
Kaba-Kulak
Kagoshima Maruba (TI 158)
Katerini
Katerini S53
Krumovgrad 58
MS Basma
MS Katerini S53
Nevrokop 1146
Ozbas (TI 1645)
Perustitza (TI 980)
Prilep (TI 1291)
Prilep (TI 1325)
Prilep 12-2/1
Prilep 23
Samsun (TC 536)
Samsun 959 (TI 1570)
Samsun Evkaf (TI 1723)
Samsun Holmes NN (TC 540)
Samsun Maden (TI 1647)
Samsun NO 15 (TC 541)
Samsun-BLK SHK Tol (TC 542)
Samsun-Canik (TI 1678)
Samsun-Maden (TI 1679)
Saribaptar 407 - Izmir Region
Smyrna (TC 543)
Smyrna No. 23 (TC 545)
Smyrna No. 9 (TC 544)
Smyrna-Blk Shk Tol (TC 546)
Trabzon (TI 1649)
Trabzon (TI 1682)
Trapezund 161 (TI 1407)
Turkish (TC 548)
Turkish Angshit (TI 90)
Turkish Samsum (TI 92)
Turkish Tropizoid (TI 93)
Turkish Varotic (TI 89)
Xanthi (TI 1662)

[0190] In an aspect, tobacco plants, seeds, or plant parts provided herein are of a cigar tobacco variety selected from the group consisting of the tobacco varieties listed in Table 7, and any variety essentially derived from any one of the foregoing varieties.

TABLE 7
Cigar Tobacco Varieties

Bahai (TI 62)
Beinhart 1000
Beinhart 1000 (TI 1562)
Beinhart 1000-1 (TI 1561)
Bergerac C
Bergerac C (TI 1529)
Big Cuban (TI 1565)
Castillo Negro, Blanco, Pina (TI 448)
Castillo Negro, Blanco, Pina (TI 448A)
Castillo Negro, Blanco, Pina (TI 449)
Caujaro (TI 893)
Chocoa (TI 289)
Chocoa (TI 313)
Connecticut 15 (TC 183)
Connecticut Broadleaf
Connecticut Broadleaf (TC 186)
Connecticut Shade (TC 188)
Criollo, Colorado (TI 1093)
Enshu (TI 1586)
Florida 301
Florida 301 (TC 195)
PA Broadleaf (TC 119)
Pennsylvania Broadleaf
Pennsylvania Broadleaf (TC 119)
Petite Havana SR1
Petite Havana SR1 (TC 105)

[0191] In an aspect, tobacco plants, seeds, or plant parts provided herein are of a tobacco variety selected from the group consisting of the tobacco varieties listed in Table 8, and any variety essentially derived from any one of the foregoing varieties.

TABLE 8
Other Tobacco Varieties

Chocoa (TI 319)
Hoja Parada (TI 1089)
Hoj a Parado (Galpoa) (TI 1068)
Perique (St. James Parrish)
Perique (TC 556)
Perique (TI 1374)
Sylvestris (TI 984)
TI 179

[0192] In an aspect, a tobacco plant or plant part is from a variety selected from the group consisting of the tobacco varieties listed in Table 2, Table 3, Table 4, Table 5, Table 6, Table 7, and Table 8. In another aspect, a tobacco plant or plant part is from a variety listed in Table 2. In another aspect, a tobacco plant or plant part is from a variety listed in Table 3. In another aspect, a tobacco plant or plant part is from a variety listed in Table 4. In another aspect, a tobacco plant or plant part is from a variety listed in Table 5. In another aspect, a tobacco plant or plant part is from a variety listed in Table 6. In another aspect, a tobacco plant or plant part is from a variety listed in Table 7. In another aspect, a tobacco plant or plant part is from a variety listed in Table 8.

[0193] In an aspect, a tobacco seed is from a variety selected from the group consisting of the tobacco varieties listed in Table 2, Table 3, Table 4, Table 5, Table 6, Table 7, and Table 8. In another aspect, a tobacco seed is from a variety listed in Table 2. In another aspect, a tobacco seed is from a variety listed in Table 3. In another aspect, a tobacco seed is from a variety listed in Table 4. In another aspect, a tobacco seed is from a variety listed in Table 5. In another aspect, a tobacco seed is from a variety listed in Table 6. In another aspect, a tobacco seed is from a variety listed in Table 7. In another aspect, a tobacco seed is from a variety listed in Table 8.

[0194] In an aspect, a tobacco cell is from a variety selected from the group consisting of the tobacco varieties listed in Table 2, Table 3, Table 4, Table 5, Table 6, Table 7, and Table 8. In another aspect, a tobacco cell is from a variety listed in Table 2. In another aspect, a tobacco cell is from a variety listed in Table 3. In another aspect, a tobacco cell is from a variety listed in Table 4. In another aspect, a tobacco cell is from a variety listed in Table 5. In another aspect, a tobacco cell is from a variety listed in Table 6. In another aspect, a tobacco cell is from a variety listed in Table 7. In another aspect, a tobacco cell is from a variety listed in Table 8.

[0195] All foregoing mentioned specific varieties of flue-cured, dark air-cured, Burley, Maryland, dark fire-cured, cigar, or Oriental type are listed only for exemplary purposes. Any additional flue-cured, dark air-cured, Burley, Maryland, dark fire-cured, cigar, or Oriental varieties are also contemplated in the present application.

[0196] In an aspect, a plant or variety provided herein is an inbred plant or variety. As used herein, an “inbred” variety is a variety that has been bred for genetic homogeneity.

[0197] As used herein, a “hybrid” is created by crossing two plants from different varieties or species, such that the progeny comprises genetic material from each parent. Skilled artisans recognize that higher order hybrids can be generated as well. For example, a first hybrid can be made by crossing Variety C with Variety D to create a C×D hybrid, and a second hybrid can be made by crossing Variety E with Variety F to create an E×F hybrid. The first and second hybrids can be further crossed to create the higher order hybrid (C×D)×(E×F) comprising genetic information from all four parent varieties. In an aspect, a plant or seed provided herein is a hybrid plant or seed.

[0198] In an aspect, a tobacco plant provided herein is an inbred tobacco plant. In an aspect, a tobacco seed provided herein is an inbred tobacco seed. In an aspect, a tobacco plant provided herein is a hybrid tobacco plant. In another aspect, a tobacco seed provided herein is a hybrid tobacco seed.

[0199] In an aspect, a Cannabis plant provided herein is an inbred Cannabis plant. In an aspect, a Cannabis seed provided herein is an inbred Cannabis seed. In an aspect, a Cannabis plant provided herein is a hybrid Cannabis plant. In another aspect, a Cannabis seed provided herein is a hybrid Cannabis seed.

[0200] Unless specified otherwise, all comparisons to control plants require similar growth conditions or comparable growth conditions for the two plants being compared. As used herein, “grown under comparable conditions,” “similar growth conditions” or “comparable growth conditions” refer to similar environmental conditions and/or agronomic practices for growing and making meaningful comparisons between two or more plant genotypes so that neither environmental conditions nor agronomic practices would contribute to or explain any difference observed between the two or more plant genotypes. Environmental conditions include, for example, light, temperature, water (humidity), and nutrition (e.g., nitrogen and phosphorus). Agronomic practices include, for example, seeding, clipping, undercutting, transplanting, topping, and suckering. See Chapters 4B and 4C of Tobacco, Production, Chemistry and Technology, Davis & Nielsen, eds., Blackwell Publishing, Oxford (1999), pp 70-103. See, also, Amaducci et al. Field Crops Research, 107:161-169 (2008). As used herein, a “control plant” refers to a plant of identical, or nearly identical, genetic makeup as the modified plant being compared, except for the non-natural mutation or recombinant DNA construct provided herein that was introduced to the modified plant.

[0201] In an aspect, a first plant variety and a second plant variety are the same variety. In an aspect, a first plant variety and a second plant variety are two different varieties. In an aspect, a second plant variety comprises a recombinant nucleic acid molecule.

[0202] In an aspect, a first plant variety is heterozygous for a recombinant nucleic acid molecule. In an aspect, a first plant variety is hemizygous for a recombinant nucleic acid molecule. In an aspect, a first plant variety is homozygous for a recombinant nucleic acid molecule. In an aspect, a second plant variety is heterozygous for a recombinant nucleic acid molecule. In an aspect, a second plant variety is hemizygous for a recombinant nucleic acid molecule. In an aspect, a second plant variety is homozygous for a recombinant nucleic acid molecule. In an aspect, a progeny seed, or a plant germinated therefrom, is heterozygous for a recombinant nucleic acid molecule. In an aspect, a progeny seed, or a plant germinated therefrom, is hemizygous for a recombinant nucleic acid molecule. In an aspect, a progeny seed, or a plant germinated therefrom, is homozygous for a recombinant nucleic acid molecule.

[0203] In an aspect, a first plant variety is a tobacco plant variety. In an aspect, a second plant variety is a tobacco plant variety.

[0204] In an aspect, a first plant variety is a Cannabis plant variety. In an aspect, a second plant variety is a Cannabis plant variety.

[0205] As used herein, the term “crossing” refers to the deliberate mating of two plants. In an aspect, crossing comprises pollination and/or fertilization of a first plant by a second plant. The two plants being crossed can be distantly related, closely related, or identical. In an aspect, the two plants being crossed are both modified plants. In an aspect, the two plants being crossed are of the same variety. In an aspect, the two plants being crossed are of two different varieties. In an aspect, one of the two plants being crossed is male sterile. In an aspect, one of the two plants being crossed is female sterile. In an aspect, at least one of the two plants being crossed is a hybrid tobacco plant. In an aspect, at least one of the two plants being crossed is a hybrid Cannabis plant. In an aspect, at least one of the two plants being crossed is a modified plant.

[0206] In an aspect, a plant of a first variety is the male parent in a crossing step. In an aspect, a plant of a first variety is the female parent in a crossing step. In an aspect, a plant of a second variety is the male parent in a crossing step. In an aspect, a plant of a second variety is the female parent in a crossing step.

[0207] In an aspect, a plant or variety provided herein is male sterile. In another aspect, a plant or variety provided herein is cytoplasmic male sterile (CMS). Male sterile plants can be produced by any method known in the art. Methods of producing male sterile tobacco are described in Wernsman, E. A., and Rufty, R. C. 1987. Chapter Seventeen. Tobacco. Pages 669-698 in: Cultivar Development. Crop Species. W. H. Fehr (ed.), MacMillan Publishing Go., Inc., New York, N.Y. 761 pp. See also kush[dot]com/blog/feminized-Cannabis-seeds-all-you-need-to-know, which describes processes such as rodelization and spraying female Cannabis plants with colloidal silver every day after flowering to reduce ethylene production.

[0208] In another aspect, a plant or variety provided herein is female sterile. As a non-limiting example, female sterile plants can be made by mutating the STIGI gene. See, for example, Goldman et al. 1994, EMBO Journal 13:2976-2984.

[0209] In an aspect, this disclosure provides a method of producing a modified tobacco plant comprising: (a) introducing a recombinant nucleic acid molecule to at least one tobacco cell, where the recombinant nucleic acid molecule comprises a nucleic acid sequence encoding a polypeptide involved in terpene biosynthesis operably linked to a heterologous promoter; (b) selecting at least one tobacco cell comprising the recombinant nucleic acid molecule; and (c) regenerating a modified tobacco plant from the at least one tobacco cell selected in step (b) where the modified tobacco plant comprises an increased amount of at least one terpene in at least one tissue as compared to a control tobacco plant lacking the recombinant nucleic acid molecule when grown under comparable conditions.

[0210] In an aspect, this disclosure provides a method of producing a modified Cannabis plant comprising: (a) introducing a recombinant nucleic acid molecule to at least one Cannabis cell, where the recombinant nucleic acid molecule comprises a nucleic acid sequence encoding a polypeptide involved in terpene biosynthesis operably linked to a heterologous promoter; (b) selecting at least one Cannabis cell comprising the recombinant nucleic acid molecule; and (c) regenerating a modified Cannabis plant from the at least one Cannabis cell selected in step (b) where the modified Cannabis plant comprises an increased amount of at least one terpene in at least one tissue as compared to a control Cannabis plant lacking the recombinant nucleic acid molecule when grown under comparable conditions.

### Transformation

[0211] Numerous methods for introducing a recombinant DNA construct to a plant cell are known in the art, which can be used according to methods of the present application to produce a transgenic plant cell and plant. Any suitable method or technique for transformation of a plant cell known in the art can be used according to present methods. Effective methods for transformation of plants include bacterially mediated transformation, such as Agrobacterium-mediated or Rhizobium-mediated transformation and microprojectile bombardment-mediated transformation. See, e.g., Feeney and Punja, In Vitro Cell. and Dev. Biol.—Plant, 39:578-585 (2003). A variety of methods are known in the art for transforming explants with a transformation vector via bacterially mediated transformation or microprojectile bombardment and then subsequently culturing, etc., those explants to regenerate or develop transgenic plants. Other methods for plant transformation, such as microinjection, electroporation, vacuum infiltration, pressure, sonication, silicon carbide fiber agitation, polyethylene glycol (PEG)-mediated transformation, etc., are also known in the art. Transgenic plants produced by these transformation methods can be chimeric or non-chimeric for the transformation event depending on the methods and explants used.

[0212] Methods of transforming plant cells are well known by persons of ordinary skill in the art. For instance, specific instructions for transforming plant cells by microprojectile bombardment with particles coated with recombinant DNA (e.g., biolistic transformation) are found in U.S. Pat. Nos. 5,550,318; 5,538,880 6,160,208; 6,399,861; and 6,153,812 and Agrobacterium-mediated transformation is described in U.S. Pat. Nos. 5,159,135; 5,824,877; 5,591,616; 6,384,301; 5,750,871; 5,463,174; and 5,188,958, all of which are incorporated herein by reference. Additional methods for transforming plants can be found in, for example, Compendium of Transgenic Crop Plants (2009) Blackwell Publishing. Any appropriate method known to those skilled in the art can be used to transform a tobacco or Cannabis cell with any of the nucleic acid molecules provided herein.

[0213] In an aspect, this disclosure provides a method comprising transforming a tobacco or Cannabis cell with a recombinant nucleic acid molecule, where the recombinant nucleic acid molecule comprises a nucleic acid sequence encoding a polypeptide involved in the biosynthesis of at least one terpene operably linked to a heterologous promoter.

[0214] In an aspect, this disclosure provides a method for producing a tobacco or Cannabis plant, the method comprising: (a) crossing at least one tobacco or Cannabis plant of a first tobacco or Cannabis variety with at least one tobacco or Cannabis plant of a second tobacco or Cannabis variety to produce at least one progeny tobacco or Cannabis seed, where the at least one tobacco or Cannabis plant of the first tobacco or Cannabis variety comprises a recombinant nucleic acid molecule comprising a nucleic acid sequence encoding a polypeptide involved in the biosynthesis of at least one terpene operably linked to a heterologous promoter; and (b) selecting for at least one progeny tobacco or Cannabis seed, or a plant germinated therefrom, where the at least one progeny tobacco or Cannabis seed or plant germinated therefrom comprises the recombinant nucleic acid molecule.

[0215] In an aspect, this disclosure provides a method for producing a tobacco or Cannabis plant, the method comprising: (a) crossing at least one tobacco or Cannabis plant of a first tobacco or Cannabis variety with at least one tobacco or Cannabis plant of a second tobacco or Cannabis variety to produce at least one progeny tobacco or Cannabis seed, where the at least one tobacco or Cannabis plant of the first tobacco or Cannabis variety comprises at least one non-natural mutation in an endogenous gene encoding a polypeptide involved in the biosynthesis of at least one terpene, where the at least one tobacco or Cannabis plant of the first tobacco or Cannabis variety exhibits increased mRNA expression of the endogenous gene or increased accumulation of the polypeptide as compared to a control tobacco or Cannabis plant of the first tobacco or Cannabis variety lacking the at least one non-natural mutation when grown under comparable conditions; and (b) selecting for at least one progeny tobacco or Cannabis seed, or a plant germinated therefrom, where the at least one progeny tobacco or Cannabis seed or plant germinated therefrom comprises the at least one non-natural mutation.

[0216] In an aspect, a method of introducing a nucleic acid molecule to a tobacco or Cannabis cell comprises Agrobacterium-mediated transformation. In another aspect, a method of introducing a nucleic acid molecule to a tobacco or Cannabis cell comprises PEG-mediated transformation. In another aspect, a method of introducing a nucleic acid molecule to a tobacco or Cannabis cell comprises biolistic transformation. In another aspect, a method of introducing a nucleic acid molecule to a tobacco or Cannabis cell comprises liposome-mediated transfection (lipofection). In another aspect, a method of introducing a nucleic acid molecule to a tobacco or Cannabis cell comprises lentiviral transfection.

[0217] Lipofection is described in e.g., U.S. Pat. Nos. 5,049,386, 4,946,787; and 4,897,355) and lipofection reagents are sold commercially (e.g., Transfectam™ and Lipofectin™). Cationic and neutral lipids that are suitable for efficient receptor-recognition lipofection of polynucleotides include those of International Publication WO 1991/017424 and International Publication WO 1991/016024. Delivery can be to cells (e.g. in vitro or ex vivo administration) or target tissues (e.g. in vivo administration).

[0218] Any tobacco cell from which a fertile tobacco plant can be regenerated is contemplated as a useful recipient cell for practice of this disclosure. Similarly, any Cannabis cell from which a fertile Cannabis plant can be regenerated is contemplated as a useful recipient cell for practice of this disclosure.

[0219] In an aspect, a recombinant DNA construct is introduced to a tobacco cell. In an aspect, a recombinant DNA construct is introduced to a tobacco protoplast cell. In another aspect, a recombinant DNA construct is introduced to a tobacco callus cell. In an aspect, a recombinant DNA construct is introduced to a tobacco cell selected from the group consisting of a seed cell, a fruit cell, a leaf cell, a cotyledon cell, a hypocotyl cell, a meristem cell, an embryo cell, an endosperm cell, a root cell, a shoot cell, a stem cell, a flower cell, an inflorescence cell, a stalk cell, a pedicel cell, a style cell, a stigma cell, a receptacle cell, a petal cell, a sepal cell, a pollen cell, an anther cell, a filament cell, an ovary cell, an ovule cell, a pericarp cell, and a phloem cell.

[0220] In an aspect, a recombinant DNA construct is introduced to a Cannabis cell. In an aspect, a recombinant DNA construct is introduced to a Cannabis protoplast cell. In another aspect, a recombinant DNA construct is introduced to a Cannabis callus cell. In an aspect, a recombinant DNA construct is introduced to a Cannabis cell selected from the group consisting of a seed cell, a fruit cell, a leaf cell, a cotyledon cell, a hypocotyl cell, a meristem cell, an embryo cell, an endosperm cell, a root cell, a shoot cell, a stem cell, a flower cell, an inflorescence cell, a stalk cell, a pedicel cell, a style cell, a stigma cell, a receptacle cell, a petal cell, a sepal cell, a pollen cell, an anther cell, a filament cell, an ovary cell, an ovule cell, a pericarp cell, and a phloem cell.

[0221] Callus can be initiated from various tissue sources, including, but not limited to, immature embryos or parts of embryos, seedling apical meristems, microspores, and the like. Those cells which are capable of proliferating as callus can serve as recipient cells for transformation. Practical transformation methods and materials for making transgenic plants of this disclosure (e.g., various media and recipient target cells, transformation of immature embryos, and subsequent regeneration of fertile transgenic plants) are disclosed, for example, in U.S. Pat. Nos. 6,194,636 and 6,232,526 and U.S. Patent Application Publication 2004/0216189, all of which are incorporated herein by reference.

[0222] In an aspect, this disclosure provides a method of producing a modified tobacco or Cannabis plant comprising: (a) introducing a recombinant DNA construct to at least one tobacco or Cannabis cell, where said recombinant DNA construct comprises a heterologous promoter operably linked to a nucleic acid encoding at least one small RNA molecule capable of binding to and reducing the expression of a nucleic acid sequence encoding a polypeptide involved in the biosynthesis of at least one terpene; (b) selecting at least one tobacco or Cannabis cell comprising said recombinant DNA construct; and (c) regenerating at least one modified tobacco or Cannabis plant from said at least one tobacco or Cannabis cell selected in step (b), where the modified tobacco or Cannabis plant comprises a reduced amount of at least one terpene in at least one tissue as compared to a control tobacco or Cannabis plant lacking the recombinant DNA construct when grown under comparable conditions.

[0223] In an aspect, this disclosure provides a method comprising transforming a tobacco or Cannabis cell with a recombinant nucleic acid molecule, where the recombinant nucleic acid molecule comprises a heterologous promoter operably linked to a nucleic acid encoding at least one small RNA molecule capable of binding to and reducing the expression of a nucleic acid sequence encoding a polypeptide involved in the biosynthesis of at least one terpene.

[0224] In an aspect, this disclosure provides a method for producing a tobacco or Cannabis plant, the method comprising: (a) crossing at least one tobacco or Cannabis plant of a first tobacco or Cannabis variety with at least one tobacco or Cannabis plant of a second tobacco or Cannabis variety to produce at least one progeny tobacco or Cannabis seed, where the at least one tobacco or Cannabis plant of the first tobacco or Cannabis variety comprises a recombinant nucleic acid molecule comprising a heterologous promoter operably linked to a nucleic acid encoding at least one small RNA molecule capable of binding to and reducing the expression of a nucleic acid sequence encoding a polypeptide involved in the biosynthesis of at least one terpene; and selecting for at least one progeny tobacco or Cannabis seed, or a plant germinated therefrom, where the at least one progeny tobacco or Cannabis seed or plant germinated therefrom comprises the recombinant nucleic acid molecule.

### Mutations

[0225] Without being limiting, a modified plant can comprise a non-natural mutation or a recombinant DNA construct. In an aspect, a modified tobacco plant comprises a non-natural mutation. In another aspect, a modified tobacco plant comprises a recombinant DNA construct. In another aspect, a modified tobacco plant comprises a genetic modification. In an aspect, a modified Cannabis plant comprises a non-natural mutation. In another aspect, a modified Cannabis plant comprises a recombinant DNA construct. In another aspect, a modified Cannabis plant comprises a genetic modification.

[0226] In an aspect, this disclosure provides a method of producing a modified tobacco or Cannabis plant comprising: (a) inducing at least one non-natural mutation in at least one tobacco or Cannabis cell in an endogenous gene encoding a polypeptide involved in terpene biosynthesis; (b) selecting at least one tobacco or Cannabis plant comprising the at least one non-natural mutation from step (a); and (c) regenerating a modified tobacco or Cannabis plant from the at least one tobacco or Cannabis cell selected in step (b), where the modified tobacco or Cannabis plant comprises an increased amount of at least one terpene in at least one tissue as compared to a control tobacco or Cannabis plant lacking the at least one non-natural mutation when grown under comparable conditions.

[0227] As used herein, a “mutation” refers to an inheritable genetic modification introduced into a gene to alter the expression or activity of a product encoded by a reference sequence of the gene. A mutation in a certain gene, such as, for example, limonene synthase (LS), is referred to as an LS mutant. Such a modification can be in any sequence region of a gene, for example, in a promoter, 5′ untranslated region (UTR), exon, intron, 3′-UTR, or terminator region. In an aspect, a mutation reduces, inhibits, or eliminates the expression or activity of a gene product. In another aspect, a mutation increases, elevates, strengthens, or augments the expression or activity of a gene product.

[0228] In an aspect, mutations are not natural polymorphisms that exist in a particular tobacco variety or cultivar. In an aspect, a mutation is a “non-natural” or “non-naturally occurring” mutation. As used herein, a “non-natural” or “non-naturally occurring” mutation refers to a non-spontaneous mutation generated via human intervention, and does not correspond to a spontaneous mutation generated without human intervention. Non-limiting examples of human intervention include mutagenesis (e.g., chemical mutagenesis, ionizing radiation mutagenesis) and targeted genetic modifications (e.g., CRISPR-based methods, TALEN-based methods, zinc finger-based methods). Non-natural mutations and non-naturally occurring mutations do not include spontaneous mutations that arise naturally (e.g., via aberrant DNA replication in a germ line of a plant).

[0229] In an aspect, mutations are not natural polymorphisms that exist in a particular tobacco variety or cultivar. It will be appreciated that, when identifying a mutation, the reference DNA sequence should be from the same variety of tobacco. For example, if a modified tobacco plant comprising a mutation is from the variety TN90, then the endogenous reference sequence must be the endogenous TN90 sequence, not a homologous sequence from a different tobacco variety (e.g., K326). Similarly, if a modified tobacco cell comprising a mutation is a TN90 cell, then the endogenous reference sequence must be the endogenous TN90 sequence, not a homologous sequence from a tobacco cell from a different tobacco variety (e.g., K326).

[0230] In an aspect, mutations are not natural polymorphisms that exist in a particular Cannabis species, variety or cultivar. It will be appreciated that, when identifying a mutation, the reference DNA sequence should be from the same species, variety, or cultivar of Cannabis. For example, if a modified Cannabis plant comprising a mutation is a strain of C. indica, then the endogenous reference sequence must be the corresponding endogenous C. indica sequence, not a homologous sequence from a different Cannabis species or strain (e.g. a sequence from C. sativa or a different strain of C. indica). Similarly, if a modified Cannabis cell comprising a mutation is a cell from C. indica, then the endogenous reference sequence must be the corresponding endogenous C. indica sequence, not a homologous sequence from a Cannabis cell from a different Cannabis variety or species (e.g., a Sativa strain).

[0231] In an aspect, a tobacco plant, tobacco seed, or part thereof, is homozygous for at least one non-natural mutation. In another aspect, a tobacco plant, tobacco seed, or part thereof, is heterozygous for at least one non-natural mutation. In an aspect, a tobacco plant, tobacco seed, or part thereof is hemizygous for at least one non-natural mutation. In another aspect, a tobacco plant, tobacco seed, or part thereof, is homozygous for an introduced recombinant DNA construct. In another aspect, a tobacco plant, tobacco seed, or part thereof, is hemizygous for an introduced recombinant DNA construct. In a further aspect, a tobacco plant, tobacco seed, or part thereof, is heterozygous for an introduced recombinant DNA construct.

[0232] In an aspect, a Cannabis plant, Cannabis seed, or part thereof, is homozygous for at least one non-natural mutation. In another aspect, a Cannabis plant, Cannabis seed, or part thereof, is heterozygous for at least one non-natural mutation. In an aspect, a Cannabis plant, Cannabis seed, or part thereof is hemizygous for at least one non-natural mutation. In another aspect, a Cannabis plant, Cannabis seed, or part thereof, is homozygous for an introduced recombinant DNA construct. In another aspect, a Cannabis plant, Cannabis seed, or part thereof, is hemizygous for an introduced recombinant DNA construct. In a further aspect, a Cannabis plant, Cannabis seed, or part thereof, is heterozygous for an introduced recombinant DNA construct.

[0233] In an aspect, a tobacco seed, or the plant germinated therefrom, is heterozygous for the recombinant nucleic acid molecule. In an aspect, a tobacco seed, or the plant germinated therefrom, is hemizygous for the recombinant nucleic acid molecule. In an aspect, a tobacco seed, or the plant germinated therefrom, is homozygous for the recombinant nucleic acid molecule.

[0234] In an aspect, a Cannabis seed, or the plant germinated therefrom, is heterozygous for the recombinant nucleic acid molecule. In an aspect, a Cannabis seed, or the plant germinated therefrom, is hemizygous for the recombinant nucleic acid molecule. In an aspect, a Cannabis seed, or the plant germinated therefrom, is homozygous for the recombinant nucleic acid molecule.

[0235] In an aspect, a mutation provided herein creates a dominant allele of the mutated locus. Dominant alleles are alleles that mask the contribution of a second allele at the same locus. A dominant allele can be a “dominant negative allele” or a “dominant positive allele.” Dominant negative alleles, or antimorphs, are alleles that act in opposition to normal allelic function. A dominant negative allele typically does not function normally and either directly inhibits the activity of a wild-type protein (e.g., through dimerization) or inhibits the activity of a second protein that is required for the normal function of the wild-type protein (e.g., an activator or a downstream component of a pathway). For example, a dominant negative allele abrogates or reduces the normal function of an allele in a heterozygous or homozygous state. Dominant positive alleles can increase normal gene function (e.g., a hypermorph) or provide new functions for a gene (e.g., a neomorph). A semi-dominant allele occurs when penetrance of a linked phenotype in individuals heterozygous for the allele is less than that which is observed in individuals homozygous for the allele.

[0236] In an aspect, a mutation provided herein creates a dominant negative allele of the mutated locus. In another aspect, a mutation provided herein creates a dominant positive allele of a mutated locus.

[0237] As used herein, “inducing” a mutation refers to generating a mutation in a polynucleotide sequence via human intervention. Many suitable methods for inducing mutations in tobacco and Cannabis are known in the art. Non-limiting examples of such methods include use of chemical mutagens, use of irradiation, use of nucleases, use of transposons, and use of Agrobacterium. In an aspect, inducing a mutation comprises the use of an agent selected from the group consisting of a chemical mutagen, irradiation, a transposon, Agrobacterium, and a nuclease.

[0238] In an aspect, inducing a mutation comprises the use of a chemical mutagen. In an aspect, a chemical mutagen comprises ethyl methanesulfonate (EMS).

[0239] In another aspect, inducing a mutation comprises the use of irradiation. In an aspect, irradiation comprises gamma rays, X-rays, ionizing radiation, or fast neutrons.

[0240] In an aspect, inducing a mutation comprises the use of a transposon. In another aspect, inducing a mutation comprises the use of Agrobacterium.

[0241] In a further aspect, inducing a mutation comprises the use of a nuclease. In an aspect, a nuclease is selected from the group consisting of a meganuclease, a zinc-finger nuclease, a transcription activator-like effector nuclease, a CRISPR/Cas9 nuclease, a CRISPR/Cpf1 nuclease, a CRISPR/CasX nuclease, a CRISPR/CasY nuclease, and a Csm1 nuclease. In an aspect, inducing a mutation comprises the use of a CRISPR/Cas9 nuclease. In an aspect, inducing a mutation comprises the use of a CRISPR/Cpf1 nuclease. In an aspect, inducing a mutation comprises the use of a CRISPR/CasX nuclease. In an aspect, inducing a mutation comprises the use of a CRISPR/CasY nuclease. In an aspect, inducing a mutation comprises the use of a Csm1 nuclease.

[0242] Several types of mutations are known in the art. In an aspect, a mutation comprises an insertion. An “insertion” refers to the addition of one or more nucleotides or amino acids to a given polynucleotide or amino acid sequence, respectively, as compared to an endogenous reference polynucleotide or amino acid sequence. In another aspect, a mutation comprises a deletion. A “deletion” refers to the removal of one or more nucleotides or amino acids to a given polynucleotide or amino acid sequence, respectively, as compared to an endogenous reference polynucleotide or amino acid sequence. In another aspect, a mutation comprises a substitution. A “substitution” refers to the replacement of one or more nucleotides or amino acids to a given polynucleotide or amino acid sequence, respectively, as compared to an endogenous reference polynucleotide or amino acid sequence. In another aspect, a mutation comprises an inversion. An “inversion” refers to when a segment of a polynucleotide or amino acid sequence is reversed end-to-end. A “duplication” refers to when a segment of a polynucleotide or amino acid sequence is repeated. The repeated segment can immediately follow the original segment, or it can be separated from the original segment by one or more nucleotides or amino acids. In an aspect, a mutation provided herein comprises a mutation selected from the group consisting of an insertion, a deletion, a substitution, a duplication, and an inversion.

[0243] In an aspect, a non-natural mutation comprises a mutation selected from the group consisting of a substitution, a deletion, an insertion, a duplication, and an inversion of one or more nucleotides relative to an endogenous nucleic acid sequence selected from the group consisting of SEQ ID NOs: 1-42, 112-139, 155-156, 158-159, and 161-190.

[0244] In an aspect, a non-natural mutation comprises a mutation selected from the group consisting of a substitution, a deletion, an insertion, a duplication, and an inversion of one or more nucleotides relative to an endogenous nucleic acid sequence encoding an amino acid sequence selected from the group consisting of SEQ ID NOs: 43-63, 140-153, 157, 160, and 191-205.

[0245] In an aspect, a non-natural mutation comprises at least one mutation selected from the group consisting of a nonsense mutation, a missense mutation, a frameshift mutation, a splice-site mutation, and any combinations thereof. As used herein, a “nonsense mutation” refers to a mutation to a nucleic acid sequence that introduces a premature stop codon to an amino acid sequence by the nucleic acid sequence. As used herein, a “missense mutation” refers to a mutation to a nucleic acid sequence that causes a substitution within the amino acid sequence encoded by the nucleic acid sequence. As used herein, a “frameshift mutation” refers to an insertion or deletion to a nucleic acid sequence that shifts the frame for translating the nucleic acid sequence to an amino acid sequence. A “splice-site mutation” refers to a mutation in a nucleic acid sequence that causes an intron to be retained for protein translation, or, alternatively, for an exon to be excluded from protein translation. Splice-site mutations can cause nonsense, missense, or frameshift mutations.

[0246] Mutations in coding regions of genes (e.g., exonic mutations) can result in a truncated protein or polypeptide when a mutated messenger RNA (mRNA) is translated into a protein or polypeptide. In an aspect, this disclosure provides a mutation that results in the truncation of a protein or polypeptide. As used herein, a “truncated” protein or polypeptide comprises at least one fewer amino acid as compared to an endogenous control protein or polypeptide. For example, if endogenous Protein A comprises 100 amino acids, a truncated version of Protein A can comprise between 1 and 99 amino acids. In an aspect, a non-natural mutation results in a truncation of a polypeptide.

[0247] Without being limited by any scientific theory, one way to cause a protein or polypeptide truncation is by the introduction of a premature stop codon in an mRNA transcript of an endogenous gene. In an aspect, this disclosure provides a mutation that results in a premature stop codon in an mRNA transcript of an endogenous gene. As used herein, a “stop codon” refers to a nucleotide triplet within an mRNA transcript that signals a termination of protein translation. A “premature stop codon” refers to a stop codon positioned earlier (e.g., on the 5′-side) than the normal stop codon position in an endogenous mRNA transcript. Without being limiting, several stop codons are known in the art, including “UAG,” “UAA,” “UGA,” “TAG,” “TAA,” and “TGA.”

[0248] In an aspect, a mutation provided herein comprises a null mutation. In an aspect, at least one non-natural mutation provided herein comprises a null mutation. As used herein, a “null mutation” refers to a mutation that confers a complete loss-of-function for a protein encoded by a gene comprising the mutation, or, alternatively, a mutation that confers a complete loss-of-function for a small RNA encoded by a genomic locus. A null mutation can cause lack of mRNA transcript production, a lack of small RNA transcript production, a lack of protein function, or a combination thereof.

[0249] A mutation provided herein can be positioned in any part of an endogenous gene. In an aspect, a mutation provided herein is positioned within an exon of an endogenous gene. In another aspect, a mutation provided herein is positioned within an intron of an endogenous gene. In a further aspect, a mutation provided herein is positioned within a 5′-UTR of an endogenous gene. In still another aspect, a mutation provided herein is positioned within a 3′-UTR of an endogenous gene. In yet another aspect, a mutation provided herein is positioned within a promoter of an endogenous gene. In yet another aspect, a mutation provided herein is positioned within a terminator of an endogenous gene. In an aspect, a non-natural mutation provided herein comprises a mutation in a sequence region selected from the group consisting of a promoter, a 5′-UTR, a 3′-UTR, an exon, an intron, and a terminator.

[0250] The screening and selection of mutagenized tobacco plants can be through any methodologies known to those having ordinary skill in the art. Examples of screening and selection methodologies include, but are not limited to, Southern analysis, PCR amplification for detection of a polynucleotide, Northern blots, RNase protection, primer-extension, RT-PCR amplification for detecting RNA transcripts, Sanger sequencing, Next Generation sequencing technologies (e.g., Illumina, PacBio, Ion Torrent, 454, and Oxford nanopore) enzymatic assays for detecting enzyme or ribozyme activity of polypeptides and polynucleotides, and protein gel electrophoresis, Western blots, immunoprecipitation, and enzyme-linked immunoassays to detect polypeptides. Other techniques such as in situ hybridization, enzyme staining, and immunostaining, also can be used to detect the presence or expression of polypeptides and/or polynucleotides. Methods for performing all of the referenced and similar techniques are known.

### Reduced Expression/Activity

[0251] In an aspect, a small RNA molecule reduces the expression of any nucleic acid sequence to which it is capable of binding. In another aspect, a non-natural mutation provided herein reduces the expression of the mutated nucleic acid sequence as compared to the non-mutated nucleic acid sequence in a control plant grown under comparable conditions.

[0252] Reduced expression of an endogenous nucleic acid sequence can be measured using any suitable method known in the art. Non-limiting examples of measuring expression include quantitative reverse transcriptase polymerase chain reaction (qRT-PCR), digital PCR, RNA blot (e.g., a Northern blot), RNA sequencing. Differences in expression can be described as an absolute quantification or a relative quantification. See, for example, Livak and Schmittgen, Methods, 25:402-408 (2001). If an endogenous nucleic acid sequence encodes a protein, changes in expression can be inferred by examining the accumulation of the encoded protein. Non-limiting examples of measuring protein accumulation include Western blots and enzyme-linked immunosorbent assays (ELISAs).

[0253] In an aspect, a reduction in expression is measured using qRT-PCR. In another aspect, a reduction in expression is measured using an RNA blot. In another aspect, a reduction in expression is measured using RNA sequencing. In an aspect, a reduction in expression is measured using digital PCR. In a further aspect, a reduction in expression is measured using a Western blot. In yet a further aspect, a reduction in expression is measured using an ELISA.

[0254] In an aspect, a non-natural mutation in a nucleic acid sequence selected from the group consisting of SEQ ID NOs: 1-42, 112-139, 155-156, 158-159, and 161-190 results in a reduced level of expression of the nucleic acid sequence as compared to the nucleic acid sequence lacking the non-natural mutation in a control plant grown under comparable conditions. In an aspect, a non-natural mutation in a nucleic acid sequence encoding an amino acid sequence selected from the group consisting of SEQ ID NOs: 43-63, 140-153, 157, 160, and 191-205 results in a reduced level of expression of the nucleic acid sequence as compared to the nucleic acid sequence lacking the non-natural mutation in a control plant grown under comparable conditions.

[0255] In an aspect, a reduction in expression comprises a reduction of at least 1% as compared to expression in the same tissue of a control plant grown under comparable conditions. In another aspect, a reduction in expression comprises a reduction of at least 5% as compared to expression in the same tissue of a control plant grown under comparable conditions. In another aspect, a reduction in expression comprises a reduction of at least 10% as compared to expression in the same tissue of a control plant grown under comparable conditions. In another aspect, a reduction in expression comprises a reduction of at least 25% as compared to expression in the same tissue of a control plant grown under comparable conditions. In another aspect, a reduction in expression comprises a reduction of at least 50% as compared to expression in the same tissue of a control plant grown under comparable conditions. In another aspect, a reduction in expression comprises a reduction of at least 75% as compared to expression in the same tissue of a control plant grown under comparable conditions. In another aspect, a reduction in expression comprises a reduction of at least 90% as compared to expression in the same tissue of a control plant grown under comparable conditions. In another aspect, a reduction in expression comprises a reduction of at least 95% as compared to expression in the same tissue of a control plant grown under comparable conditions.

[0256] In an aspect, a reduction in expression comprises a reduction of between 1% and 99% as compared to expression in the same tissue of a control plant grown under comparable conditions. In another aspect, a reduction in expression comprises a reduction of between 1% and 90% as compared to expression in the same tissue of a control plant grown under comparable conditions. In another aspect, a reduction in expression comprises a reduction of between 1% and 75% as compared to expression in the same tissue of a control plant grown under comparable conditions. In another aspect, a reduction in expression comprises a reduction of between 1% and 50% as compared to expression in the same tissue of a control plant grown under comparable conditions. In another aspect, a reduction in expression comprises a reduction of between 1% and 25% as compared to expression in the same tissue of a control plant grown under comparable conditions. In another aspect, a reduction in expression comprises a reduction of between 25% and 90% as compared to expression in the same tissue of a control plant grown under comparable conditions. In another aspect, a reduction in expression comprises a reduction of between 50% and 90% as compared to expression in the same tissue of a control plant grown under comparable conditions. In another aspect, a reduction in expression comprises a reduction of between 25% and 75% as compared to expression in the same tissue of a control plant grown under comparable conditions. In an aspect, a reduction in expression comprises a statistically significant reduction as compared to expression in the same tissue of a control plant grown under comparable conditions.

[0257] One of ordinary skill in the art would recognize that any level of reduction is envisioned, so long as the level of reduction has been determined to be statistically significant using an accepted statistical hypothesis test. As a non-limiting example, a Student's t-test is one statistical hypothesis test that can be used to determine if a reduction in expression between a modified plant and a control plant is statistically significant. As used herein, “statistically significant” refers to a p-value of less than or equal to 0.05.

[0258] In an aspect, a non-natural mutation results in a reduced level of activity by a protein or polypeptide encoded by a nucleic acid sequence provided herein as compared to the activity of a control plant grown under comparable conditions. In another aspect, a non-natural mutation in an endogenous nucleic acid sequence selected from the group consisting of SEQ ID NOs: 1-42, 112-139, 155-156, 158-159, and 161-190 reduces the level of activity by a protein or polypeptide encoded by the nucleic acid sequence as compared to activity of a protein or polypeptide encoded by the endogenous nucleic acid sequence in a control tobacco or Cannabis plant when grown under comparable conditions, where the nucleic acid sequence lacks the non-natural mutation in the control tobacco or Cannabis plant. In another aspect, a non-natural mutation in an endogenous nucleic acid sequence, where the endogenous nucleic acid sequence encodes an amino acid sequence selected from the group consisting of SEQ ID NOs: 43-63, 140-153, 157, 160, and 191-205 reduces the level of activity by a protein or polypeptide encoded by the nucleic acid sequence as compared to activity of a protein or polypeptide encoded by the endogenous nucleic acid sequence in a control tobacco or Cannabis plant when grown under comparable conditions, where the nucleic acid sequence lacks the non-natural mutation in the control tobacco or Cannabis plant.

[0259] As used herein, when referring to a protein or polypeptide, “activity” refers to the ability to carry out an enzymatic function. As a non-limiting example, activity of a dehydrogenase protein or polypeptide refers to the ability of a dehydrogenase to remove a hydrogen group from an organic molecule substrate. Without being limited by any scientific theory, if a mutated dehydrogenase protein has reduced activity as compared to a non-mutated control dehydrogenase protein, the mutated dehydrogenase (a) may be unable to remove a hydrogen group from any organic molecule substrate; (b) only be able to remove a hydrogen group from an organic molecule substrate at a reduced rate as compared to a non-mutated dehydrogenase protein; (c) only be able to remove hydrogen groups from substrates that are not suitable substrates for a non-mutated dehydrogenase protein; or (d) a combination of (b) and (c). Conversely, also without being limited by any scientific theory, if a mutated dehydrogenase protein has increased activity as compared to a non-mutated control dehydrogenase protein, the mutated dehydrogenase may be able to (a) remove a hydrogen group from an organic molecule substrate at an increased rate as compared to a non-mutated dehydrogenase protein; (b) be able to remove hydrogen groups from substrates that are not suitable substrates for a non-mutated dehydrogenase; or (c) both (a) and (b). The activity of a dehydrogenase can be measured using techniques standard in the art. For example, see Yu et al., Enzyme Microb. Technol., 49:272-276 (2011); Seely and Pegg, J. Biol. Chem., 258:2496-2500 (1983); and Mizusaki et al., Plant and Cell Physiology, 14:103-110 (1973).

### Increased Expression/Activity

[0260] In an aspect, a non-natural mutation results in increased expression of a nucleic acid sequence. In an aspect, a non-natural mutation results in an increased level of expression of said nucleic acid sequence as compared to expression of said nucleic acid sequence in the same tissue of a control tobacco or Cannabis plant when grown under comparable conditions, where said nucleic acid sequence lacks the at least one non-natural mutation in said control tobacco or Cannabis plant.

[0261] In an aspect, this disclosure provides a tobacco plant comprising increased expression of a sequence at least 70% identical to a sequence selected from the group consisting of SEQ ID NOs: 1-21, 112-125, 155, 158, and 176-190. In an aspect, this disclosure provides a tobacco plant comprising increased expression of a sequence at least 75% identical to a sequence selected from the group consisting of SEQ ID NOs: 1-21, 112-125, 155, 158, and 176-190. In an aspect, this disclosure provides a tobacco plant comprising increased expression of a sequence at least 80% identical to a sequence selected from the group consisting of SEQ ID NOs: 1-21, 112-125, 155, 158, and 176-190. In an aspect, this disclosure provides a tobacco plant comprising increased expression of a sequence at least 85% identical to a sequence selected from the group consisting of SEQ ID NOs: 1-21, 112-125, 155, 158, and 176-190. In an aspect, this disclosure provides a tobacco plant comprising increased expression of a sequence at least 90% identical to a sequence selected from the group consisting of SEQ ID NOs: 1-21, 112-125, 155, 158, and 176-190. In an aspect, this disclosure provides a tobacco plant comprising increased expression of a sequence at least 92.5% identical to a sequence selected from the group consisting of SEQ ID NOs: 1-21, 112-125, 155, 158, and 176-190. In an aspect, this disclosure provides a tobacco plant comprising increased expression of a sequence at least 95% identical to a sequence selected from the group consisting of SEQ ID NOs: 1-21, 112-125, 155, 158, and 176-190. In an aspect, this disclosure provides a tobacco plant comprising increased expression of a sequence at least 96% identical to a sequence selected from the group consisting of SEQ ID NOs: 1-21, 112-125, 155, 158, and 176-190. In an aspect, this disclosure provides a tobacco plant comprising increased expression of a sequence at least 97% identical to a sequence selected from the group consisting of SEQ ID NOs: 1-21, 112-125, 155, 158, and 176-190. In an aspect, this disclosure provides a tobacco plant comprising increased expression of a sequence at least 98% identical to a sequence selected from the group consisting of SEQ ID NOs: 1-21, 112-125, 155, 158, and 176-190. In an aspect, this disclosure provides a tobacco plant comprising increased expression of a sequence at least 99% identical to a sequence selected from the group consisting of SEQ ID NOs: 1-21, 112-125, 155, 158, and 176-190. In an aspect, this disclosure provides a tobacco plant comprising increased expression of a sequence at least 99.5% identical to a sequence selected from the group consisting of SEQ ID NOs: 1-21, 112-125, 155, 158, and 176-190. In an aspect, this disclosure provides a tobacco plant comprising increased expression of a sequence 100% identical to a sequence selected from the group consisting of SEQ ID NOs: 1-21, 112-125, 155, 158, and 176-190.

[0262] In an aspect, this disclosure provides a Cannabis plant comprising increased expression of a sequence at least 70% identical to a sequence selected from the group consisting of SEQ ID NOs: 22-42, 126-139, 156, 159, and 161-175. In an aspect, this disclosure provides a Cannabis plant comprising increased expression of a sequence at least 75% identical to a sequence selected from the group consisting of SEQ ID NOs: 22-42, 126-139, 156, 159, and 161-175. In an aspect, this disclosure provides a Cannabis plant comprising increased expression of a sequence at least 80% identical to a sequence selected from the group consisting of SEQ ID NOs: 22-42, 126-139, 156, 159, and 161-175. In an aspect, this disclosure provides a Cannabis plant comprising increased expression of a sequence at least 85% identical to a sequence selected from the group consisting of SEQ ID NOs: 22-42, 126-139, 156, 159, and 161-175. In an aspect, this disclosure provides a Cannabis plant comprising increased expression of a sequence at least 90% identical to a sequence selected from the group consisting of SEQ ID NOs: 22-42, 126-139, 156, 159, and 161-175. In an aspect, this disclosure provides a Cannabis plant comprising increased expression of a sequence at least 92.5% identical to a sequence selected from the group consisting of SEQ ID NOs: 22-42, 126-139, 156, 159, and 161-175. In an aspect, this disclosure provides a Cannabis plant comprising increased expression of a sequence at least 95% identical to a sequence selected from the group consisting of SEQ ID NOs: 22-42, 126-139, 156, 159, and 161-175. In an aspect, this disclosure provides a Cannabis plant comprising increased expression of a sequence at least 96% identical to a sequence selected from the group consisting of SEQ ID NOs: 22-42, 126-139, 156, 159, and 161-175. In an aspect, this disclosure provides a Cannabis plant comprising increased expression of a sequence at least 97% identical to a sequence selected from the group consisting of SEQ ID NOs: 22-42, 126-139, 156, 159, and 161-175. In an aspect, this disclosure provides a Cannabis plant comprising increased expression of a sequence at least 98% identical to a sequence selected from the group consisting of SEQ ID NOs: 22-42, 126-139, 156, 159, and 161-175. In an aspect, this disclosure provides a Cannabis plant comprising increased expression of a sequence at least 99% identical to a sequence selected from the group consisting of SEQ ID NOs: 22-42, 126-139, 156, 159, and 161-175. In an aspect, this disclosure provides a Cannabis plant comprising increased expression of a sequence at least 99.5% identical to a sequence selected from the group consisting of SEQ ID NOs: 22-42, 126-139, 156, 159, and 161-175. In an aspect, this disclosure provides a Cannabis plant comprising increased expression of a sequence 100% identical to a sequence selected from the group consisting of SEQ ID NOs: 22-42, 126-139, 156, 159, and 161-175.

[0263] In an aspect, this disclosure provides a tobacco plant comprising increased expression of a sequence at least 70% identical to a sequence selected from the group consisting of SEQ ID NOs: 22-42, 126-139, 156, 159, and 161-175. In an aspect, this disclosure provides a tobacco plant comprising increased expression of a sequence at least 75% identical to a sequence selected from the group consisting of SEQ ID NOs: 22-42, 126-139, 156, 159, and 161-175. In an aspect, this disclosure provides a tobacco plant comprising increased expression of a sequence at least 80% identical to a sequence selected from the group consisting of SEQ ID NOs: 22-42, 126-139, 156, 159, and 161-175. In an aspect, this disclosure provides a tobacco plant comprising increased expression of a sequence at least 85% identical to a sequence selected from the group consisting of SEQ ID NOs: 22-42, 126-139, 156, 159, and 161-175. In an aspect, this disclosure provides a tobacco plant comprising increased expression of a sequence at least 90% identical to a sequence selected from the group consisting of SEQ ID NOs: 22-42, 126-139, 156, 159, and 161-175. In an aspect, this disclosure provides a tobacco plant comprising increased expression of a sequence at least 92.5% identical to a sequence selected from the group consisting of SEQ ID NOs: 22-42, 126-139, 156, 159, and 161-175. In an aspect, this disclosure provides a tobacco plant comprising increased expression of a sequence at least 95% identical to a sequence selected from the group consisting of SEQ ID NOs: 22-42, 126-139, 156, 159, and 161-175. In an aspect, this disclosure provides a tobacco plant comprising increased expression of a sequence at least 96% identical to a sequence selected from the group consisting of SEQ ID NOs: 22-42, 126-139, 156, 159, and 161-175. In an aspect, this disclosure provides a tobacco plant comprising increased expression of a sequence at least 97% identical to a sequence selected from the group consisting of SEQ ID NOs: 22-42, 126-139, 156, 159, and 161-175. In an aspect, this disclosure provides a tobacco plant comprising increased expression of a sequence at least 98% identical to a sequence selected from the group consisting of SEQ ID NOs: 22-42, 126-139, 156, 159, and 161-175. In an aspect, this disclosure provides a tobacco plant comprising increased expression of a sequence at least 99% identical to a sequence selected from the group consisting of SEQ ID NOs: 22-42, 126-139, 156, 159, and 161-175. In an aspect, this disclosure provides a tobacco plant comprising increased expression of a sequence at least 99.5% identical to a sequence selected from the group consisting of SEQ ID NOs: 22-42, 126-139, 156, 159, and 161-175. In an aspect, this disclosure provides a tobacco plant comprising increased expression of a sequence 100% identical to a sequence selected from the group consisting of SEQ ID NOs: 22-42, 126-139, 156, 159, and 161-175.

[0264] In an aspect, this disclosure provides a Cannabis plant comprising increased expression of a sequence at least 70% identical to a sequence selected from the group consisting of SEQ ID NOs: 1-21, 112-125, 155, 158, and 176-190. In an aspect, this disclosure provides a Cannabis plant comprising increased expression of a sequence at least 75% identical to a sequence selected from the group consisting of SEQ ID NOs: 1-21, 112-125, 155, 158, and 176-190. In an aspect, this disclosure provides a Cannabis plant comprising increased expression of a sequence at least 80% identical to a sequence selected from the group consisting of SEQ ID NOs: 1-21, 112-125, 155, 158, and 176-190. In an aspect, this disclosure provides a Cannabis plant comprising increased expression of a sequence at least 85% identical to a sequence selected from the group consisting of SEQ ID NOs: 1-21, 112-125, 155, 158, and 176-190. In an aspect, this disclosure provides a Cannabis plant comprising increased expression of a sequence at least 90% identical to a sequence selected from the group consisting of SEQ ID NOs: 1-21, 112-125, 155, 158, and 176-190. In an aspect, this disclosure provides a Cannabis plant comprising increased expression of a sequence at least 92.5% identical to a sequence selected from the group consisting of SEQ ID NOs: 1-21, 112-125, 155, 158, and 176-190. In an aspect, this disclosure provides a Cannabis plant comprising increased expression of a sequence at least 95% identical to a sequence selected from the group consisting of SEQ ID NOs: 1-21, 112-125, 155, 158, and 176-190. In an aspect, this disclosure provides a Cannabis plant comprising increased expression of a sequence at least 96% identical to a sequence selected from the group consisting of SEQ ID NOs: 1-21, 112-125, 155, 158, and 176-190. In an aspect, this disclosure provides a Cannabis plant comprising increased expression of a sequence at least 97% identical to a sequence selected from the group consisting of SEQ ID NOs: 1-21, 112-125, 155, 158, and 176-190. In an aspect, this disclosure provides a Cannabis plant comprising increased expression of a sequence at least 98% identical to a sequence selected from the group consisting of SEQ ID NOs: 1-21, 112-125, 155, 158, and 176-190. In an aspect, this disclosure provides a Cannabis plant comprising increased expression of a sequence at least 99% identical to a sequence selected from the group consisting of SEQ ID NOs: 1-21, 112-125, 155, 158, and 176-190. In an aspect, this disclosure provides a Cannabis plant comprising increased expression of a sequence at least 99.5% identical to a sequence selected from the group consisting of SEQ ID NOs: 1-21, 112-125, 155, 158, and 176-190. In an aspect, this disclosure provides a Cannabis plant comprising increased expression of a sequence 100% identical to a sequence selected from the group consisting of SEQ ID NOs: 1-21, 112-125, 155, 158, and 176-190.

[0265] In another aspect, this disclosure provides increased expression of a sequence encoding a protein at least 70% identical or similar to an amino acid sequence selected from the group consisting of SEQ ID NOs: 43-63, 140-153, 157, 160, and 191-205. In another aspect, this disclosure provides increased expression of a sequence encoding a protein at least 75% identical or similar to an amino acid sequence selected from the group consisting of SEQ ID NOs: 43-63, 140-153, 157, 160, and 191-205. In another aspect, this disclosure provides increased expression of a sequence encoding a protein at least 80% identical or similar to an amino acid sequence selected from the group consisting of SEQ ID NOs: 43-63, 140-153, 157, 160, and 191-205. In another aspect, this disclosure provides increased expression of a sequence encoding a protein at least 85% identical or similar to an amino acid sequence selected from the group consisting of SEQ ID NOs: 43-63, 140-153, 157, 160, and 191-205. In another aspect, this disclosure provides increased expression of a sequence encoding a protein at least 90% identical or similar to an amino acid sequence selected from the group consisting of SEQ ID NOs: 43-63, 140-153, 157, 160, and 191-205. In another aspect, this disclosure provides increased expression of a sequence encoding a protein at least 92.5% identical or similar to an amino acid sequence selected from the group consisting of SEQ ID NOs: 43-63, 140-153, 157, 160, and 191-205. In another aspect, this disclosure provides increased expression of a sequence encoding a protein at least 95% identical or similar to an amino acid sequence selected from the group consisting of SEQ ID NOs: 43-63, 140-153, 157, 160, and 191-205. In another aspect, this disclosure provides increased expression of a sequence encoding a protein at least 96% identical or similar to an amino acid sequence selected from the group consisting of SEQ ID NOs: 43-63, 140-153, 157, 160, and 191-205. In another aspect, this disclosure provides increased expression of a sequence encoding a protein at least 97% identical or similar to an amino acid sequence selected from the group consisting of SEQ ID NOs: 43-63, 140-153, 157, 160, and 191-205. In another aspect, this disclosure provides increased expression of a sequence encoding a protein at least 98% identical or similar to an amino acid sequence selected from the group consisting of SEQ ID NOs: 43-63, 140-153, 157, 160, and 191-205. In another aspect, this disclosure provides increased expression of a sequence encoding a protein at least 99% identical or similar to an amino acid sequence selected from the group consisting of SEQ ID NOs: 43-63, 140-153, 157, 160, and 191-205. In another aspect, this disclosure provides increased expression of a sequence encoding a protein at least 99.5% identical or similar to an amino acid sequence selected from the group consisting of SEQ ID NOs: 43-63, 140-153, 157, 160, and 191-205. In another aspect, this disclosure provides increased expression of a sequence encoding a protein 100% identical or similar to an amino acid sequence selected from the group consisting of SEQ ID NOs: 43-63, 140-153, 157, 160, and 191-205.

[0266] In an aspect, an increased level of expression comprises an increase of at least 1% as compared to expression in the same tissue of a control plant grown under comparable conditions. In an aspect, an increased level of expression comprises an increase of at least 5% as compared to expression in the same tissue of a control plant grown under comparable conditions. In another aspect, an increased level of expression comprises an increase of at least 10% as compared to expression in the same tissue of a control plant grown under comparable conditions. In another aspect, an increased level of expression comprises an increase of at least 25% as compared to expression in the same tissue of a control plant grown under comparable conditions. In another aspect, an increased level of expression comprises an increase of at least 50% as compared to expression in the same tissue of a control plant grown under comparable conditions. In another aspect, an increased level of expression comprises an increase of at least 75% as compared to expression in the same tissue of a control plant grown under comparable conditions. In another aspect, an increased level of expression comprises an increase of at least 100% as compared to expression in the same tissue of a control plant grown under comparable conditions. In another aspect, an increased level of expression comprises an increase of at least 200% as compared to expression in the same tissue of a control plant grown under comparable conditions. In another aspect, an increased level of expression comprises an increase of at least 500% as compared to expression in the same tissue of a control plant grown under comparable conditions.

[0267] In an aspect, a non-natural mutation results in an increased level of activity by a protein or polypeptide encoded by said nucleic acid sequence as compared to activity of a protein or polypeptide encoded by said nucleic acid sequence in a control tobacco plant or a control Cannabis plant when grown under comparable conditions, where said nucleic acid sequence lacks the at least one non-natural mutation in said control tobacco or Cannabis plant.

### Nucleic Acids and Amino Acids

[0268] As used herein, “heterologous” refers to a sequence (nucleic acid or amino acid) that originates from a foreign species, or, if from the same species, is substantially modified from its native form in composition and/or genomic locus by deliberate human intervention. The term also is applicable to nucleic acid constructs, also referred to herein as “polynucleotide constructs.” In this manner, a “heterologous” nucleic acid construct is intended to mean a construct that originates from a foreign species, or, if from the same species, is substantially modified from its native form in composition and/or genomic locus by deliberate human intervention. Heterologous nucleic acid constructs include, but are not limited to, recombinant nucleotide constructs that have been introduced into a plant or plant part thereof, for example, via transformation methods or subsequent breeding of a transgenic plant with another plant of interest. It will be appreciated that an endogenous promoter can be considered heterologous to an operably linked endogenous gene if the endogenous promoter and endogenous gene are not naturally operably linked (e.g., human intervention is required to put them in operable linkage). As used herein, an “endogenous” nucleic acid sequence refers to a nucleic acid sequence that occurs naturally in the genome of an organism.

[0269] In an aspect, a heterologous polynucleotide comprises a gene. In an aspect, a heterologous polynucleotide encodes a small RNA molecule or a precursor thereof. In an aspect, a heterologous polynucleotide encodes a polypeptide.

[0270] As used herein, a “gene” refers to a polynucleotide that can produce a functional unit (e.g., without being limiting, for example, a polypeptide, or a small RNA molecule). A gene can comprise a promoter, an enhancer sequence, a leader sequence, a transcriptional start site, a transcriptional stop site, a polyadenylation site, one or more exons, one or more introns, a 5′-UTR, a 3′-UTR, or any combination thereof. A “gene sequence” can comprise a polynucleotide sequence encoding a promoter, an enhancer sequence, a leader sequence, a transcriptional start site, a transcriptional stop site, a polyadenylation site, one or more exons, one or more introns, a 5′-UTR, a 3′-UTR, or any combination thereof. In one aspect, a gene encodes a small RNA molecule or a precursor thereof. In another aspect, a gene encodes a polypeptide.

[0271] In an aspect, a gene comprises a nucleic acid sequence at least 70% identical to a nucleic acid sequence selected from the group consisting of SEQ ID NOs: 1-21, 112-125, 155, 158, and 176-190. In an aspect, a gene comprises a nucleic acid sequence at least 75% identical to a nucleic acid sequence selected from the group consisting of SEQ ID NOs: 1-21, 112-125, 155, 158, and 176-190. In an aspect, a gene comprises a nucleic acid sequence at least 80% identical to a nucleic acid sequence selected from the group consisting of SEQ ID NOs: 1-21, 112-125, 155, 158, and 176-190. In an aspect, a gene comprises a nucleic acid sequence at least 85% identical to a nucleic acid sequence selected from the group consisting of SEQ ID NOs: 1-21, 112-125, 155, 158, and 176-190. In an aspect, a gene comprises a nucleic acid sequence at least 90% identical to a nucleic acid sequence selected from the group consisting of SEQ ID NOs: 1-21, 112-125, 155, 158, and 176-190. In an aspect, a gene comprises a nucleic acid sequence at least 92.5% identical to a nucleic acid sequence selected from the group consisting of SEQ ID NOs: 1-21, 112-125, 155, 158, and 176-190. In an aspect, a gene comprises a nucleic acid sequence at least 95% identical to a nucleic acid sequence selected from the group consisting of SEQ ID NOs: 1-21, 112-125, 155, 158, and 176-190. In an aspect, a gene comprises a nucleic acid sequence at least 96% identical to a nucleic acid sequence selected from the group consisting of SEQ ID NOs: 1-21, 112-125, 155, 158, and 176-190. In an aspect, a gene comprises a nucleic acid sequence at least 97% identical to a nucleic acid sequence selected from the group consisting of SEQ ID NOs: 1-21, 112-125, 155, 158, and 176-190. In an aspect, a gene comprises a nucleic acid sequence at least 98% identical to a nucleic acid sequence selected from the group consisting of SEQ ID NOs: 1-21, 112-125, 155, 158, and 176-190. In an aspect, a gene comprises a nucleic acid sequence at least 99% identical to a nucleic acid sequence selected from the group consisting of SEQ ID NOs: 1-21, 112-125, 155, 158, and 176-190. In an aspect, a gene comprises a nucleic acid sequence at least 99.5% identical to a nucleic acid sequence selected from the group consisting of SEQ ID NOs: 1-21, 112-125, 155, 158, and 176-190. In an aspect, a gene comprises a nucleic acid sequence 100% identical to a nucleic acid sequence selected from the group consisting of SEQ ID NOs: 1-21, 112-125, 155, 158, and 176-190.

[0272] In an aspect, a gene comprises a nucleic acid sequence at least 70% identical to a nucleic acid sequence selected from the group consisting of SEQ ID NOs: 22-42, 126-139, 156, 159, and 161-175. In an aspect, a gene comprises a nucleic acid sequence at least 75% identical to a nucleic acid sequence selected from the group consisting of SEQ ID NOs: 22-42, 126-139, 156, 159, and 161-175. In an aspect, a gene comprises a nucleic acid sequence at least 80% identical to a nucleic acid sequence selected from the group consisting of SEQ ID NOs: 22-42, 126-139, 156, 159, and 161-175. In an aspect, a gene comprises a nucleic acid sequence at least 85% identical to a nucleic acid sequence selected from the group consisting of SEQ ID NOs: 22-42, 126-139, 156, 159, and 161-175. In an aspect, a gene comprises a nucleic acid sequence at least 90% identical to a nucleic acid sequence selected from the group consisting of SEQ ID NOs: 22-42, 126-139, 156, 159, and 161-175. In an aspect, a gene comprises a nucleic acid sequence at least 92.5% identical to a nucleic acid sequence selected from the group consisting of SEQ ID NOs: 22-42, 126-139, 156, 159, and 161-175. In an aspect, a gene comprises a nucleic acid sequence at least 95% identical to a nucleic acid sequence selected from the group consisting of SEQ ID NOs: 22-42, 126-139, 156, 159, and 161-175. In an aspect, a gene comprises a nucleic acid sequence at least 96% identical to a nucleic acid sequence selected from the group consisting of SEQ ID NOs: 22-42, 126-139, 156, 159, and 161-175. In an aspect, a gene comprises a nucleic acid sequence at least 97% identical to a nucleic acid sequence selected from the group consisting of SEQ ID NOs: 22-42, 126-139, 156, 159, and 161-175. In an aspect, a gene comprises a nucleic acid sequence at least 98% identical to a nucleic acid sequence selected from the group consisting of SEQ ID NOs: 22-42, 126-139, 156, 159, and 161-175. In an aspect, a gene comprises a nucleic acid sequence at least 99% identical to a nucleic acid sequence selected from the group consisting of SEQ ID NOs: 22-42, 126-139, 156, 159, and 161-175. In an aspect, a gene comprises a nucleic acid sequence at least 99.5% identical to a nucleic acid sequence selected from the group consisting of SEQ ID NOs: 22-42, 126-139, 156, 159, and 161-175. In an aspect, a gene comprises a nucleic acid sequence 100% identical to a nucleic acid sequence selected from the group consisting of SEQ ID NOs: 22-42, 126-139, 156, 159, and 161-175.

[0273] In an aspect, a gene comprises a nucleic acid sequence encoding an amino acid sequence at least 70% identical or similar to an amino acid sequence selected from the group consisting of SEQ ID NOs: 43-63, 140-153, 157, 160, and 191-205. In an aspect, a gene comprises a nucleic acid sequence encoding an amino acid sequence at least 75% identical or similar to an amino acid sequence selected from the group consisting of SEQ ID NOs: 43-63, 140-153, 157, 160, and 191-205. In an aspect, a gene comprises a nucleic acid sequence encoding an amino acid sequence at least 80% identical or similar to an amino acid sequence selected from the group consisting of SEQ ID NOs: 43-63, 140-153, 157, 160, and 191-205. In an aspect, a gene comprises a nucleic acid sequence encoding an amino acid sequence at least 85% identical or similar to an amino acid sequence selected from the group consisting of SEQ ID NOs: 43-63, 140-153, 157, 160, and 191-205. In an aspect, a gene comprises a nucleic acid sequence encoding an amino acid sequence at least 90% identical or similar to an amino acid sequence selected from the group consisting of SEQ ID NOs: 43-63, 140-153, 157, 160, and 191-205. In an aspect, a gene comprises a nucleic acid sequence encoding an amino acid sequence at least 92.5% identical or similar to an amino acid sequence selected from the group consisting of SEQ ID NOs: 43-63, 140-153, 157, 160, and 191-205. In an aspect, a gene comprises a nucleic acid sequence encoding an amino acid sequence at least 95% identical or similar to an amino acid sequence selected from the group consisting of SEQ ID NOs: 43-63, 140-153, 157, 160, and 191-205. In an aspect, a gene comprises a nucleic acid sequence encoding an amino acid sequence at least 96% identical or similar to an amino acid sequence selected from the group consisting of SEQ ID NOs: 43-63, 140-153, 157, 160, and 191-205. In an aspect, a gene comprises a nucleic acid sequence encoding an amino acid sequence at least 97% identical or similar to an amino acid sequence selected from the group consisting of SEQ ID NOs: 43-63, 140-153, 157, 160, and 191-205. In an aspect, a gene comprises a nucleic acid sequence encoding an amino acid sequence at least 98% identical or similar to an amino acid sequence selected from the group consisting of SEQ ID NOs: 43-63, 140-153, 157, 160, and 191-205. In an aspect, a gene comprises a nucleic acid sequence encoding an amino acid sequence at least 99% identical or similar to an amino acid sequence selected from the group consisting of SEQ ID NOs: 43-63, 140-153, 157, 160, and 191-205. In an aspect, a gene comprises a nucleic acid sequence encoding an amino acid sequence at least 99.9% identical or similar to an amino acid sequence selected from the group consisting of SEQ ID NOs: 43-63, 140-153, 157, 160, and 191-205. In an aspect, a gene comprises a nucleic acid sequence encoding an amino acid sequence 100% identical or similar to an amino acid sequence selected from the group consisting of SEQ ID NOs: 43-63, 140-153, 157, 160, and 191-205.

[0274] In an aspect, a polypeptide comprises an amino acid sequence at least 70% identical or similar to an amino acid sequence selected from the group consisting of SEQ ID NOs: 43-63, 140-153, 157, 160, and 191-205. In an aspect, a polypeptide comprises an amino acid sequence at least 75% identical or similar to an amino acid sequence selected from the group consisting of SEQ ID NOs: 43-63, 140-153, 157, 160, and 191-205. In an aspect, a polypeptide comprises an amino acid sequence at least 80% identical or similar to an amino acid sequence selected from the group consisting of SEQ ID NOs: 43-63, 140-153, 157, 160, and 191-205. In an aspect, a polypeptide comprises an amino acid sequence at least 85% identical or similar to an amino acid sequence selected from the group consisting of SEQ ID NOs: 43-63, 140-153, 157, 160, and 191-205. In an aspect, a polypeptide comprises an amino acid sequence at least 90% identical or similar to an amino acid sequence selected from the group consisting of SEQ ID NOs: 43-63, 140-153, 157, 160, and 191-205. In an aspect, a polypeptide comprises an amino acid sequence at least 92.5% identical or similar to an amino acid sequence selected from the group consisting of SEQ ID NOs: 43-63, 140-153, 157, 160, and 191-205. In an aspect, a polypeptide comprises an amino acid sequence at least 95% identical or similar to an amino acid sequence selected from the group consisting of SEQ ID NOs: 43-63, 140-153, 157, 160, and 191-205. In an aspect, a polypeptide comprises an amino acid sequence at least 96% identical or similar to an amino acid sequence selected from the group consisting of SEQ ID NOs: 43-63, 140-153, 157, 160, and 191-205. In an aspect, a polypeptide comprises an amino acid sequence at least 97% identical or similar to an amino acid sequence selected from the group consisting of SEQ ID NOs: 43-63, 140-153, 157, 160, and 191-205. In an aspect, a polypeptide comprises an amino acid sequence at least 98% identical or similar to an amino acid sequence selected from the group consisting of SEQ ID NOs: 43-63, 140-153, 157, 160, and 191-205. In an aspect, a polypeptide comprises an amino acid sequence at least 99% identical or similar to an amino acid sequence selected from the group consisting of SEQ ID NOs: 43-63, 140-153, 157, 160, and 191-205. In an aspect, a polypeptide comprises an amino acid sequence at least 99.9% identical or similar to an amino acid sequence selected from the group consisting of SEQ ID NOs: 43-63, 140-153, 157, 160, and 191-205. In an aspect, a polypeptide comprises an amino acid sequence 100% identical or similar to an amino acid sequence selected from the group consisting of SEQ ID NOs: 43-63, 140-153, 157, 160, and 191-205.

[0275] The terms “percent identity” or “percent identical” as used herein in reference to two or more nucleotide or amino acid sequences is calculated by (i) comparing two optimally aligned sequences (nucleotide or amino acid) over a window of comparison (the “alignable” region or regions), (ii) determining the number of positions at which the identical nucleic acid base (for nucleotide sequences) or amino acid residue (for proteins and polypeptides) occurs in both sequences to yield the number of matched positions, (iii) dividing the number of matched positions by the total number of positions in the window of comparison, and then (iv) multiplying this quotient by 100% to yield the percent identity. If the “percent identity” is being calculated in relation to a reference sequence without a particular comparison window being specified, then the percent identity is determined by dividing the number of matched positions over the region of alignment by the total length of the reference sequence. Accordingly, for purposes of the present application, when two sequences (query and subject) are optimally aligned (with allowance for gaps in their alignment), the “percent identity” for the query sequence is equal to the number of identical positions between the two sequences divided by the total number of positions in the query sequence over its length (or a comparison window), which is then multiplied by 100%.

[0276] When percentage of sequence identity is used in reference to amino acids it is recognized that residue positions which are not identical often differ by conservative amino acid substitutions, where amino acid residues are substituted for other amino acid residues with similar chemical properties (e.g., charge or hydrophobicity) and therefore do not change the functional properties of the molecule. When sequences differ in conservative substitutions, the percent sequence identity can be adjusted upwards to correct for the conservative nature of the substitution. Sequences that differ by such conservative substitutions are said to have “sequence similarity” or “similarity.”

[0277] For optimal alignment of sequences to calculate their percent identity, various pair-wise or multiple sequence alignment algorithms and programs are known in the art, such as ClustalW or Basic Local Alignment Search Tool® (BLAST™), etc., that can be used to compare the sequence identity or similarity between two or more nucleotide or amino acid sequences. Although other alignment and comparison methods are known in the art, the alignment and percent identity between two sequences (including the percent identity ranges described above) can be as determined by the Clustal W algorithm, see, e.g., Chenna et al., “Multiple sequence alignment with the Clustal series of programs,” Nucleic Acids Research 31: 3497-3500 (2003); Thompson et al., “Clustal W: Improving the sensitivity of progressive multiple sequence alignment through sequence weighting, position-specific gap penalties and weight matrix choice,” Nucleic Acids Research 22: 4673-4680 (1994); Larkin M A et al., “Clustal W and Clustal X version 2.0,” Bioinformatics 23: 2947-48 (2007); and Altschul et al. “Basic local alignment search tool.” J. Mol. Biol. 215:403-410 (1990), the entire contents and disclosures of which are incorporated herein by reference.

[0278] The terms “percent complementarity” or “percent complementary” as used herein in reference to two nucleotide sequences is similar to the concept of percent identity but refers to the percentage of nucleotides of a query sequence that optimally base-pair or hybridize to nucleotides a subject sequence when the query and subject sequences are linearly arranged and optimally base paired without secondary folding structures, such as loops, stems or hairpins. Such a percent complementarity can be between two DNA strands, two RNA strands, or a DNA strand and a RNA strand. The “percent complementarity” can be calculated by (i) optimally base-pairing or hybridizing the two nucleotide sequences in a linear and fully extended arrangement (i.e., without folding or secondary structures) over a window of comparison, (ii) determining the number of positions that base-pair between the two sequences over the window of comparison to yield the number of complementary positions, (iii) dividing the number of complementary positions by the total number of positions in the window of comparison, and (iv) multiplying this quotient by 100% to yield the percent complementarity of the two sequences. Optimal base pairing of two sequences can be determined based on the known pairings of nucleotide bases, such as G-C, A-T, and A-U, through hydrogen binding. If the “percent complementarity” is being calculated in relation to a reference sequence without specifying a particular comparison window, then the percent identity is determined by dividing the number of complementary positions between the two linear sequences by the total length of the reference sequence. Thus, for purposes of the present application, when two sequences (query and subject) are optimally base-paired (with allowance for mismatches or non-base-paired nucleotides), the “percent complementarity” for the query sequence is equal to the number of base-paired positions between the two sequences divided by the total number of positions in the query sequence over its length, which is then multiplied by 100%.

[0279] The use of the term “polynucleotide” or “nucleic acid molecule” is not intended to limit the present disclosure to polynucleotides comprising deoxyribonucleic acid (DNA). For example, ribonucleic acid (RNA) molecules are also envisioned. Those of ordinary skill in the art will recognize that polynucleotides and nucleic acid molecules can comprise ribonucleotides and combinations of ribonucleotides and deoxyribonucleotides. Such deoxyribonucleotides and ribonucleotides include both naturally occurring molecules and synthetic analogues. The polynucleotides of the present disclosure also encompass all forms of sequences including, but not limited to, single-stranded forms, double-stranded forms, hairpins, stem-and-loop structures, and the like. In an aspect, a nucleic acid molecule provided herein is a DNA molecule. In another aspect, a nucleic acid molecule provided herein is an RNA molecule. In an aspect, a nucleic acid molecule provided herein is single-stranded. In another aspect, a nucleic acid molecule provided herein is double-stranded. A nucleic acid molecule can encode a polypeptide or a small RNA.

[0280] As used herein, a “recombinant nucleic acid molecule” refers to a nucleic acid molecule formed by laboratory methods of genetic recombination, such as, without being limiting, molecular cloning. Similarly, a “recombinant DNA construct” refers to a DNA molecule formed by laboratory methods of genetic recombination.

[0281] In one aspect, this disclosure provides a recombinant nucleic acid molecule comprising a nucleic acid sequence encoding a polypeptide involved in the biosynthesis of at least one terpene operably linked to a heterologous promoter. In one aspect, this disclosure provides a recombinant nucleic acid molecule comprising a nucleic acid sequence encoding a polypeptide involved in the biosynthesis of at least one terpene operably linked to a heterologous promoter. In one aspect, this disclosure provides a recombinant nucleic acid molecule comprising a nucleic acid sequence encoding a polypeptide involved in the biosynthesis of at least one terpene operably linked to a heterologous promoter.

[0282] Nucleic acids can be isolated using techniques routine in the art. For example, nucleic acids can be isolated using any method including, without limitation, recombinant nucleic acid technology, and/or the polymerase chain reaction (PCR). General PCR techniques are described, for example in PCR Primer: A Laboratory Manual, Dieffenbach & Dveksler, Eds., Cold Spring Harbor Laboratory Press, 1995. Recombinant nucleic acid techniques include, for example, restriction enzyme digestion and ligation, which can be used to isolate a nucleic acid. Isolated nucleic acids also can be chemically synthesized, either as a single nucleic acid molecule or as a series of oligonucleotides. Non-limiting examples of primers that can be used to amplify specific candidate genes provided in this disclosure are provided in Table 1 (SEQ ID NOs: 64-103).

[0283] In an aspect, this disclosure provides methods of detecting mRNA expression of an endogenous gene encoding a polypeptide involved in the biosynthesis of at least one terpene. Messenger RNA (mRNA) levels can be measured by techniques standard in the art, such as reverse transcription polymerase chain reaction (RT-PCR) and microarray analysis. RNA can be reverse transcribed to cDNA (complementary DNA) by methods known in the art. Synthesized cDNA may be amplified by methods known in the art, such as real-time PCR and digital PCR for relative or absolute quantification of mRNA transcript targets.

[0284] As used herein, the term “polypeptide” refers to a chain of at least two covalently linked amino acids. Polypeptides can be encoded by polynucleotides provided herein. Proteins provided herein can be encoded by nucleic acid molecules provided herein. Proteins can comprise polypeptides provided herein. As used herein, a “protein” refers to a chain of amino acid residues that is capable of providing structure or enzymatic activity to a cell.

[0285] Polypeptides can be purified from natural sources (e.g., a biological sample) by known methods such as DEAE ion exchange, gel filtration, and hydroxyapatite chromatography. A polypeptide also can be purified, for example, by expressing a nucleic acid in an expression vector. In addition, a purified polypeptide can be obtained by chemical synthesis. The extent of purity of a polypeptide can be measured using any appropriate method, e.g., column chromatography, polyacrylamide gel electrophoresis, or HPLC analysis.

[0286] In one aspect, this disclosure provides methods of detecting recombinant nucleic acids and polypeptides in plant cells. Without being limiting, nucleic acids also can be detected using hybridization. Hybridization between nucleic acids is discussed in detail in Sambrook et al. (1989, Molecular Cloning: A Laboratory Manual, 2nd Ed., Cold Spring Harbor Laboratory Press, Cold Spring Harbor, N.Y.). mRNA expression can be localized in tissue samples using in situ hybridization.

[0287] In an aspect, this disclosure provides methods for detecting accumulation of a polypeptide in a modified tobacco plant as compared to a control tobacco plant lacking at least one non-natural mutation when grown under comparable conditions. Increased accumulation of a polypeptide in a modified plant is determined relative to detection of the same polypeptide in a control plant lacking the non-natural mutation, and grown under comparable conditions.

[0288] Polypeptides can be detected using antibodies. Techniques for detecting polypeptides using antibodies include enzyme linked immunosorbent assays (ELISAs), Western blots, immunoprecipitations and immunofluorescence. An antibody provided herein can be a polyclonal antibody or a monoclonal antibody. An antibody having specific binding affinity for a polypeptide provided herein can be generated using methods well known in the art. An antibody provided herein can be attached to a solid support such as a microtiter plate using methods known in the art.

[0289] Detection (e.g., of an amplification product, of a hybridization complex, of a polypeptide) can be accomplished using detectable labels. The term “label” is intended to encompass the use of direct labels as well as indirect labels. Detectable labels include enzymes, prosthetic groups, fluorescent materials, luminescent materials, bioluminescent materials, and radioactive materials.

[0290] In an aspect, this disclosure provides a modified tobacco or Cannabis plant, tobacco or Cannabis seed, or part thereof, comprising a recombinant DNA construct comprising a heterologous promoter operably linked to a nucleic acid encoding at least one small RNA molecule capable of binding to and reducing the expression of a nucleic acid sequence encoding a polypeptide involved in the biosynthesis of at least one terpene.

[0291] In an aspect, this disclosure provides a small RNA molecule, or a precursor thereof. As used herein, a “small RNA molecule” refers to a non-coding RNA molecule of between 16 nucleotides and 50 nucleotides in length. In an aspect, a small RNA molecule comprises between 16 nucleotides and 40 nucleotides. In another aspect, a small RNA molecule comprises between 16 nucleotides and 30 nucleotides. In another aspect, a small RNA molecule comprises between 18 nucleotides and 50 nucleotides. In another aspect, a small RNA molecule comprises between 18 nucleotides and 40 nucleotides. In another aspect, a small RNA molecule comprises between 18 nucleotides and 30 nucleotides. In another aspect, a small RNA molecule comprises between 18 nucleotides and 25 nucleotides. In another aspect, a small RNA molecule comprises between 20 nucleotides and 28 nucleotides. In another aspect, a small RNA molecule comprises between 20 nucleotides and 24 nucleotides. In another aspect, a small RNA molecule comprises between 21 nucleotides and 23 nucleotides. In another aspect, a small RNA molecule comprises 16, 17, 18, 19, 20, 21, 22, 23, 24, 25, 26, 27, 28, 29, 30, 31, 32, 33, 34, 35, 36, 37, 38, 39, 40, 41, 42, 43, 44, 45, 46, 47, 48, 49, or 50 nucleotides.

[0292] In an aspect, a small RNA molecule is at least 75% identical or complementary to a nucleic acid sequence selected from the group consisting of SEQ ID NOs: 1-42, 112-139, 155-156, 158-159, and 161-190. In an aspect, a small RNA molecule is at least 80% identical or complementary to a nucleic acid sequence selected from the group consisting of SEQ ID NOs: 1-42, 112-139, 155-156, 158-159, and 161-190. In an aspect, a small RNA molecule is at least 85% identical or complementary to a nucleic acid sequence selected from the group consisting of SEQ ID NOs: 1-42, 112-139, 155-156, 158-159, and 161-190. In an aspect, a small RNA molecule is at least 90% identical or complementary to a nucleic acid sequence selected from the group consisting of SEQ ID NOs: 1-42, 112-139, 155-156, 158-159, and 161-190. In an aspect, a small RNA molecule is at least 92.5% identical or complementary to a nucleic acid sequence selected from the group consisting of SEQ ID NOs: 1-42, 112-139, 155-156, 158-159, and 161-190. In an aspect, a small RNA molecule is at least 95% identical or complementary to a nucleic acid sequence selected from the group consisting of SEQ ID NOs: 1-42, 112-139, 155-156, 158-159, and 161-190. In an aspect, a small RNA molecule is at least 97.5% identical or complementary to a nucleic acid sequence selected from the group consisting of SEQ ID NOs: 1-42, 112-139, 155-156, 158-159, and 161-190. In an aspect, a small RNA molecule is at least 99% identical or complementary to a nucleic acid sequence selected from the group consisting of SEQ ID NOs: 1-42, 112-139, 155-156, 158-159, and 161-190. In an aspect, a small RNA molecule is 100% identical or complementary to a nucleic acid sequence selected from the group consisting of SEQ ID NOs: 1-42, 112-139, 155-156, 158-159, and 161-190.

[0293] In an aspect, a small RNA molecule is at least 75% identical or complementary to a polynucleotide encoding a polypeptide selected from the group consisting of SEQ ID NOs: 43-63, 140-153, 157, 160, and 191-205. In an aspect, a small RNA molecule is at least 80% identical or complementary to a polynucleotide encoding a polypeptide selected from the group consisting of SEQ ID NOs: 43-63, 140-153, 157, 160, and 191-205. In an aspect, a small RNA molecule is at least 85% identical or complementary to a polynucleotide encoding a polypeptide selected from the group consisting of SEQ ID NOs: 43-63, 140-153, 157, 160, and 191-205. In an aspect, a small RNA molecule is at least 90% identical or complementary to a polynucleotide encoding a polypeptide selected from the group consisting of SEQ ID NOs: 43-63, 140-153, 157, 160, and 191-205. In an aspect, a small RNA molecule is at least 92.5% identical or complementary to a polynucleotide encoding a polypeptide selected from the group consisting of SEQ ID NOs: 43-63, 140-153, 157, 160, and 191-205. In an aspect, a small RNA molecule is at least 95% identical or complementary to a polynucleotide encoding a polypeptide selected from the group consisting of SEQ ID NOs: 43-63, 140-153, 157, 160, and 191-205. In an aspect, a small RNA molecule is at least 97.5% identical or complementary to a polynucleotide encoding a polypeptide selected from the group consisting of SEQ ID NOs: 43-63, 140-153, 157, 160, and 191-205. In an aspect, a small RNA molecule is at least 99% identical or complementary to a polynucleotide encoding a polypeptide selected from the group consisting of SEQ ID NOs: 43-63, 140-153, 157, 160, and 191-205. In an aspect, a small RNA molecule is 100% identical or complementary to a polynucleotide encoding a polypeptide selected from the group consisting of SEQ ID NOs: 43-63, 140-153, 157, 160, and 191-205.

[0294] In an aspect, a small RNA provided herein comprises a nucleic acid sequence at least 88.7% identical or complementary to at least 18 contiguous nucleotides of a nucleic acid sequence selected from the group consisting of SEQ ID NOs: 1-42, 112-139, 155-156, 158-159, and 161-190. In another aspect, a small RNA provided herein comprises a nucleic acid sequence at least 94.3% identical or complementary to at least 18 contiguous nucleotides of a nucleic acid sequence selected from the group consisting of SEQ ID NOs: 1-42, 112-139, 155-156, 158-159, and 161-190. In another aspect, a small RNA provided herein comprises a nucleic acid sequence 100% identical or complementary to at least 18 contiguous nucleotides of a nucleic acid sequence selected from the group consisting of SEQ ID NOs: 1-42, 112-139, 155-156, 158-159, and 161-190. In another aspect, a small RNA provided herein comprises a nucleic acid sequence at least 85% identical or complementary to at least 20 contiguous nucleotides of a nucleic acid sequence selected from the group consisting of SEQ ID NOs: 1-42, 112-139, 155-156, 158-159, and 161-190. In another aspect, a small RNA provided herein comprises a nucleic acid sequence at least 90% identical or complementary to at least 20 contiguous nucleotides of a nucleic acid sequence selected from the group consisting of SEQ ID NOs: 1-42, 112-139, 155-156, 158-159, and 161-190. In another aspect, a small RNA provided herein comprises a nucleic acid sequence at least 95% identical or complementary to at least 20 contiguous nucleotides of a nucleic acid sequence selected from the group consisting of SEQ ID NOs: 1-42, 112-139, 155-156, 158-159, and 161-190. In another aspect, a small RNA provided herein comprises a nucleic acid sequence 100% identical or complementary to at least 20 contiguous nucleotides of a nucleic acid sequence selected from the group consisting of SEQ ID NOs: 1-42, 112-139, 155-156, 158-159, and 161-190.

[0295] In an aspect, a small RNA molecule is selected from the group consisting of a double-stranded RNA, a small interfering RNA (siRNA), a trans-acting siRNA, and a microRNA (miRNA).

[0296] miRNAs are generally of between about 19 to about 25 nucleotides (commonly about 20-24 nucleotides in plants), that guide cleavage in trans of target transcripts, negatively regulating the expression of genes involved in various regulation and development pathways. In some cases, miRNAs serve to guide in-phase processing of siRNA primary transcripts.

[0297] Many microRNA genes (MIR genes) have been identified and made publicly available in a database (“miRBase,” available online at microrna[dot]sanger[dot]ac[dot]uk/sequences; also see Griffiths-Jones et al. (2003) Nucleic Acids Res., 31:439-441). MIR genes have been reported to occur in intergenic regions, both isolated and in clusters in the genome, but can also be located entirely or partially within introns of other genes (both protein-coding and non-protein-coding). For a review of miRNA biogenesis, see Kim (2005) Nature Rev. Mol. Cell. Biol., 6:376-385. Transcription of MIR genes can be, at least in some cases, under promotional control of a MIR gene's own promoter. The primary transcript, termed a “pri-miRNA,” can be quite large (several kilobases) and can be polycistronic, containing one or more pre-miRNAs (fold-back structures containing a stem-loop arrangement that is processed to the mature miRNA) as well as the usual 5′ “cap” and polyadenylated tail of an mRNA.

[0298] Maturation of a mature miRNA from its corresponding precursors (pri-miRNAs and pre-miRNAs) differs significantly between animals and plants. For example, in plant cells, microRNA precursor molecules are believed to be largely processed to the mature miRNA entirely in the nucleus, whereas in animal cells, the pri-miRNA transcript is processed in the nucleus by the animal-specific enzyme Drosha, followed by export of the pre-miRNA to the cytoplasm where it is further processed to the mature miRNA. Mature miRNAs in plants are typically 21 nucleotides in length.

[0299] Transgenic expression of miRNAs (whether a naturally occurring sequence or an artificial sequence) can be employed to regulate expression of the miRNA's target gene or genes. Inclusion of a miRNA recognition site in a transgenically expressed transcript is also useful in regulating expression of the transcript. Recognition sites of miRNAs have been validated in all regions of an mRNA, including the 5′ untranslated region, coding region, and 3′ untranslated region, indicating that the position of the miRNA target site relative to the coding sequence may not necessarily affect suppression. Because miRNAs are important regulatory elements in eukaryotes, transgenic suppression of miRNAs is useful for manipulating biological pathways and responses. Finally, promoters of MIR genes can have very specific expression patterns (e.g., cell-specific, tissue-specific, temporally specific, or inducible), and thus are useful in recombinant constructs to induce such specific transcription of a DNA sequence to which they are operably linked. Various utilities of miRNAs, their precursors, their recognition sites, and their promoters are described in detail in U.S. Patent Application Publication 2006/0200878 A1, incorporated by reference herein. Non-limiting examples of these utilities include: (1) the expression of a native miRNA or miRNA precursor sequence to suppress a target gene; (2) the expression of an artificial miRNA or miRNA precursor sequence to suppress a target gene; (3) expression of a transgene with a miRNA recognition site, where the transgene is suppressed when the mature miRNA is expressed; (4) expression of a transgene driven by a miRNA promoter.

[0300] Designing an artificial miRNA sequence can be as simple as substituting sequence that is complementary to the intended target for nucleotides in the miRNA stem region of the miRNA precursor, as demonstrated by Zeng et al. (2002) Mol. Cell, 9:1327-1333. One non-limiting example of a general method for determining nucleotide changes in the native miRNA sequence to produce the engineered miRNA precursor includes the following steps: (a) Selecting a unique target sequence of at least 18 nucleotides specific to the target gene, e.g., by using sequence alignment tools such as BLAST (see, for example, Altschul et al. (1990) J. Mol. Biol., 215:403-410; Altschul et al. (1997) Nucleic Acids Res., 25:3389-3402), for example, of both tobacco cDNA and genomic DNA databases, to identify target transcript orthologues and any potential matches to unrelated genes, thereby avoiding unintentional silencing of non-target sequences; (b) Analyzing the target gene for undesirable sequences (e.g., matches to sequences from non-target species), and score each potential 19-mer segment for GC content, Reynolds score (see Reynolds et al. (2004) Nature Biotechnol., 22:326-330), and functional asymmetry characterized by a negative difference in free energy (“.DELTA..DELTA.G” or “ΔΔG”) (see Khvorova et al. (2003) Cell, 115:209-216). Preferably 19-mers are selected that have all or most of the following characteristics: (1) a Reynolds score>4, (2) a GC content between about 40% to about 60%, (3) a negative ΔΔG, (4) a terminal adenosine, (5) lack of a consecutive run of 4 or more of the same nucleotide; (6) a location near the 3′ terminus of the target gene; (7) minimal differences from the miRNA precursor transcript. Positions at every third nucleotide in an siRNA have been reported to be especially important in influencing RNAi efficacy and an algorithm, “siExplorer” is publicly available at rna[dot]chem[dot]t[dot]u-tokyo[dot]ac[dot]jp/siexplorer.htm (see Katoh and Suzuki (2007) Nucleic Acids Res., 10.1093/nar/gkl1120); (c) Determining the reverse complement of the selected 19-mers to use in making a modified mature miRNA. The additional nucleotide at position 20 is preferably matched to the selected target sequence, and the nucleotide at position 21 is preferably chosen to either be unpaired to prevent spreading of silencing on the target transcript or paired to the target sequence to promote spreading of silencing on the target transcript; and (d) transforming the artificial miRNA into a plant.

[0301] In an aspect, a vector can be used for overexpression and knockdown, e.g., of candidate terpene biosynthesis genes. A non-limiting example of a vector is pGWB551. In an aspect, a vector comprises a nucleic acid sequence at least 90% identical to SEQ ID NO: 154. In an aspect, a vector comprises a nucleic acid sequence at least 95% identical to SEQ ID NO: 154. In an aspect, a vector comprises a nucleic acid sequence 100% identical to SEQ ID NO: 154.

### Products

[0302] In an aspect, this disclosure provides plant material from any plant or plant part provided herein. In an aspect, this disclosure provides Cannabis material from any Cannabis plant or Cannabis plant part provided herein. In an aspect, this disclosure provides cured plant material from any plant or plant part provided herein. In an aspect, this disclosure provides cured tobacco material from any tobacco plant or tobacco plant part provided herein. In an aspect, this disclosure provides cured Cannabis material from any Cannabis plant or Cannabis plant part provided herein.

[0303] In an aspect, this disclosure provides a method comprising preparing a tobacco product or a Cannabis product using cured tobacco material or Cannabis material from a modified tobacco or Cannabis plant, where the modified tobacco or Cannabis plant comprises a recombinant nucleic acid molecule comprising a nucleic acid sequence encoding a polypeptide involved in the biosynthesis of at least one terpene operably linked to a heterologous promoter. In an aspect, this disclosure provides a method comprising preparing a tobacco product or a Cannabis product using cured tobacco material or Cannabis material from a modified tobacco or Cannabis plant, where the modified tobacco or Cannabis plant comprises at least one non-natural mutation in an endogenous gene encoding a polypeptide involved in the biosynthesis of at least one terpene, where the modified tobacco or Cannabis plant exhibits increased mRNA expression of the endogenous gene or increased accumulation of the polypeptide as compared to a control tobacco or Cannabis plant lacking the at least one non-natural mutation when grown under comparable conditions.

[0304] In an aspect, cured tobacco plant material is made by a curing process selected from the group consisting of flue curing, air curing, fire curing, and sun curing. In an aspect, cured tobacco material is made by a curing process selected from the group consisting of flue curing, air curing, fire curing, and sun curing.

[0305] “Curing” is the aging process that reduces moisture and brings about the destruction of chlorophyll giving tobacco leaves a golden color and by which starch is converted to sugar. Cured tobacco therefore has a higher reducing sugar content and a lower starch content compared to harvested green leaf. In one aspect, tobacco plants or plant components provided herein can be cured using conventional means, e.g., flue-cured, barn-cured, fire-cured, air-cured or sun-cured. See, for example, Tso (1999, Chapter 1 in Tobacco, Production, Chemistry and Technology, Davis & Nielsen, eds., Blackwell Publishing, Oxford) for a description of different types of curing methods. Cured tobacco is usually aged in a wooden drum (e.g., a hogshead) or cardboard cartons in compressed conditions for several years (e.g., two to five years), at a moisture content ranging from 10% to about 25%. See, U.S. Pat. Nos. 4,516,590 and 5,372,149. Cured and aged tobacco then can be further processed. Further processing includes conditioning the tobacco under vacuum with or without the introduction of steam at various temperatures, pasteurization, and fermentation.

[0306] Following Cannabis plant harvest, Cannabis plant material is typically dried, prior to curing. Cannabis can be dried in a dark room with temperatures kept between about 15° C. and about 22° C. and humidity between 45% and 55%, with a fan for gentle air circulation. An initial drying cycle ranges between 5 days and 15 days. Dried Cannabis can then be cured to increase flavor, aroma, and potency. Length of Cannabis curing is strain-dependent. For example, some Cannabis strains benefit from 2 to 3 weeks of curing, other Cannabis strains benefit from 4 to 8 weeks of curing, while other Cannabis strains benefit from 6 months or more of curing.

[0307] Information regarding the harvesting of burley and dark tobacco varieties can be found in the 2019-2020 Burley and Dark Tobacco Production Guide (December 2018) published by the University of Kentucky, The University of Tennessee, Virginia Tech, and North Carolina State University, which is incorporated herein by reference in its entirety.

[0308] In an aspect, cured tobacco material comprises tobacco material selected from the group selected from cured leaf material, cured stem material, cured bud material, cured flower material, and cured root material. In an aspect, cured tobacco material comprises cured leaf material, cured stem material, or both. In an aspect, cured tobacco material comprises cured leaf material. In an aspect, cured tobacco material comprises cured stem material.

[0309] In an aspect, Cannabis material comprises Cannabis material selected from the group selected from leaf material, stem material, bud material, flower material, root material, hairy roots, cell culture, and callus. In an aspect, Cannabis material comprises leaf material, stem material, or both. In an aspect, Cannabis material comprises leaf material. In an aspect, Cannabis material comprises stem material.

[0310] In an aspect, cured tobacco material comprises flue-cured tobacco material. In an aspect, cured tobacco material comprises air-cured tobacco material. In an aspect, cured tobacco material comprises fire-cured tobacco material. In an aspect, cured tobacco material comprises sun-cured tobacco material. In an aspect, cured tobacco material provided herein is selected from the group consisting of air-cured tobacco material, fire-cured tobacco material, sun-cured tobacco material, and flue-cured tobacco material. In an aspect, cured tobacco material is from a tobacco variety selected from the group consisting of a flue-cured variety, a bright variety, a Burley variety, a Virginia variety, a Maryland variety, a dark variety, an Oriental variety, and a Turkish variety.

[0311] In an aspect, cured tobacco leaf provided herein is selected from the group consisting of air-cured tobacco leaf, fire-cured tobacco leaf, sun-cured tobacco leaf, and flue-cured tobacco leaf. In an aspect, cured tobacco leaf is from a tobacco variety selected from the group consisting of a flue-cured variety, a bright variety, a Burley variety, a Virginia variety, a Maryland variety, a dark variety, an Oriental variety, and a Turkish variety.

[0312] Fermentation typically is characterized by high initial moisture content, heat generation, and a 10 to 20% loss of dry weight. See, for example, U.S. Pat. Nos. 4,528,993, 4,660,577, 4,848,373, 5,372,149; U.S. Publication No. 2005/0178398; and Tso (1999, Chapter 1 in Tobacco, Production, Chemistry and Technology, Davis & Nielsen, eds., Blackwell Publishing, Oxford). Cured, aged, and fermented tobacco can be further processed (e.g., cut, shredded, expanded, or blended). See, for example, U.S. Pat. Nos. 4,528,993; 4,660,577; and 4,987,907. Cured, aged, and fermented Cannabis can be further processed (e.g., cut, shredded, expanded, or blended). In an aspect, this disclosure provides fermented tobacco material from any tobacco plant, or part thereof, provided herein. In another aspect, this disclosure provides fermented tobacco material from any modified tobacco plant, or part thereof, provided herein. In an aspect, this disclosure provides fermented Cannabis material from any Cannabis plant, or part thereof, provided herein. In another aspect, this disclosure provides fermented Cannabis material from any modified Cannabis plant, or part thereof, provided herein.

[0313] Tobacco material obtained from the tobacco lines, varieties or hybrids of the present disclosure can be used to make tobacco products. As used herein, “tobacco product” is defined as any product made or derived from tobacco that is intended for human use or consumption. In an aspect, this disclosure provides a tobacco product comprising plant material from a tobacco plant provided herein. In another aspect, this disclosure provides a tobacco product comprising plant material from a modified tobacco plant provided herein. In another aspect, this disclosure provides a tobacco product comprising cured tobacco material. In another aspect, this disclosure provides a tobacco product comprising fermented tobacco material. In another aspect, this disclosure provides a tobacco product comprising a tobacco blend.

[0314] Cannabis material obtained from the Cannabis lines, strains, varieties or hybrids of the present disclosure can be used to make Cannabis products. As used herein, “Cannabis product” is defined as any product made or derived from Cannabis that is intended for human use or consumption. In an aspect, this disclosure provides a Cannabis product comprising plant material from a Cannabis plant provided herein. In another aspect, this disclosure provides a Cannabis product comprising plant material from a modified Cannabis plant provided herein. In another aspect, this disclosure provides a Cannabis product comprising Cannabis material. In another aspect, this disclosure provides a Cannabis product comprising cured Cannabis material. In another aspect, this disclosure provides a Cannabis product comprising fermented Cannabis material. In another aspect, this disclosure provides a Cannabis product comprising a Cannabis blend.

[0315] Tobacco products include, without limitation, cigarette products (e.g., cigarettes and bidi cigarettes), cigar products (e.g., cigar wrapping tobacco and cigarillos), pipe tobacco products, products derived from tobacco, tobacco-derived nicotine products, smokeless tobacco products (e.g., moist snuff, dry snuff, and chewing tobacco), films, chewables, tabs, shaped parts, gels, consumable units, insoluble matrices, hollow shapes, reconstituted tobacco, expanded tobacco, and the like. See, e.g., U.S. Patent Publication No. US 2006/0191548.

[0316] As used herein, “cigarette” refers a tobacco product having a “rod” and “filler”. The cigarette “rod” includes the cigarette paper, filter, plug wrap (used to contain filtration materials), tipping paper that holds the cigarette paper (including the filler) to the filter, and all glues that hold these components together. The “filler” includes (1) all tobaccos, including but not limited to reconstituted and expanded tobacco, (2) non-tobacco substitutes (including but not limited to herbs, non-tobacco plant materials and other spices that may accompany tobaccos rolled within the cigarette paper), (3) casings, (4) flavorings, and (5) all other additives (that are mixed into tobaccos and substitutes and rolled into the cigarette).

[0317] In an aspect, a tobacco product comprises reconstituted tobacco. In another aspect, this disclosure provides reconstituted tobacco comprising cured tobacco material. As used herein, “reconstituted tobacco” refers to a part of tobacco filler made from tobacco dust and other tobacco scrap material, processed into sheet form and cut into strips to resemble tobacco. In addition to the cost savings, reconstituted tobacco is very important for its contribution to cigarette taste from processing flavor development using reactions between ammonia and sugars.

[0318] In an aspect, a Cannabis product comprises reconstituted Cannabis. In another aspect, this disclosure provides reconstituted Cannabis comprising Cannabis material. As used herein, “reconstituted Cannabis” refers to a part of Cannabis filler made from Cannabis dust and other Cannabis scrap material, processed into sheet form and cut into strips to resemble Cannabis.

[0319] In an aspect, a tobacco product comprises expanded tobacco. As used herein, “expanded tobacco” refers to a part of tobacco filler which is processed through expansion of suitable gases so that the tobacco is “puffed” resulting in reduced density and greater filling capacity. It reduces the weight of tobacco used in cigarettes.

[0320] In an aspect, a Cannabis product comprises expanded Cannabis. As used herein, “expanded Cannabis” refers to a part of Cannabis filler which is processed through expansion of suitable gases so that the Cannabis is “puffed” resulting in reduced density and greater filling capacity.

[0321] Tobacco products derived from plants of the present disclosure also include cigarettes and other smoking articles, particularly those smoking articles including filter elements, where the rod of smokable material includes cured tobacco within a tobacco blend. In an aspect, a tobacco product of the present disclosure is selected from the group consisting of a kretek, a bidi cigarette, a cigarillo, a non-ventilated recess filter cigarette, a vented recess filter cigarette, a cigar, snuff, pipe tobacco, cigar tobacco, cigarette tobacco, chewing tobacco, leaf tobacco, hookah tobacco, shredded tobacco, and cut tobacco.

[0322] Cannabis products derived from plants of the present disclosure also include cigarettes and other smoking articles, particularly those smoking articles including filter elements, where the rod of smokable material includes cured Cannabis within a Cannabis blend. In an aspect, a Cannabis product of the present disclosure is selected from the group consisting of a kretek, a cigarillo, a cigar, snuff, pipe Cannabis, cigar Cannabis, cigarette Cannabis, chewing Cannabis, hookah Cannabis, shredded Cannabis, and cut Cannabis.

[0323] In an aspect, a tobacco product of the present disclosure is selected from the group consisting of a cigarette, a heated tobacco product, a kretek, a bidi cigarette, a cigar, a cigarillo, a non-ventilated cigarette, a vented recess filter cigarette, pipe tobacco, snuff, snus, chewing tobacco, moist smokeless tobacco, fine cut chewing tobacco, long cut chewing tobacco, pouched chewing tobacco product, gum, a tablet, a lozenge, and a dissolving strip.

[0324] In an aspect, a Cannabis product of the present disclosure is selected from the group consisting of a cigarette, a heated Cannabis product, a kretek, a cigar, a cigarillo, pipe Cannabis, snuff, snus, chewing Cannabis, moist smokeless Cannabis, fine cut chewing Cannabis, long cut chewing Cannabis, pouched chewing Cannabis product, gum, a tablet, a lozenge, and a dissolving strip.

[0325] In an aspect, a Cannabis product of the present disclosure is a consumable product. In a further aspect, a consumable product is an edible product. In an aspect, a consumable product is an oil.

[0326] In an aspect, a tobacco product of the present disclosure is a smokeless tobacco product. In an aspect, a smokeless tobacco product is selected from the group consisting of loose leaf chewing tobacco, plug chewing tobacco, moist snuff, nasal snuff, dry snuff, and snus.

[0327] In an aspect, a Cannabis product of the present disclosure is a smokeless Cannabis product. In an aspect, a smokeless Cannabis product is selected from the group consisting of chewing Cannabis, moist snuff, dry snuff, and snus.

[0328] Smokeless tobacco or Cannabis products are not combusted and include, but not limited to, chewing tobacco, moist smokeless tobacco, moist smokeless Cannabis, snus, and dry snuff. Chewing tobacco or Cannabis is coarsely divided tobacco or Cannabis leaf that is typically packaged in a large pouch-like package and used in a plug or twist. Moist smokeless tobacco or Cannabis is a moist, more finely divided tobacco or Cannabis that is provided in loose form or in pouch form and is typically packaged in round cans and used as a pinch or in a pouch placed between an adult tobacco or Cannabis consumer's cheek and gum. Snus is a heat-treated smokeless tobacco or Cannabis. Dry snuff is finely ground tobacco or Cannabis that is placed in the mouth or used nasally.

[0329] In yet another aspect, a tobacco or Cannabis product of the present disclosure is selected from the group consisting of an electronically heated cigarette, an e-cigarette, an electronic vaporing device.

[0330] In an aspect, a tobacco or Cannabis product of the present disclosure can be a blended tobacco or Cannabis product.

[0331] In another aspect, this disclosure provides a tobacco blend comprising cured tobacco material. A tobacco blend can comprise any combination of cured tobacco, uncured tobacco, fermented tobacco, unfermented tobacco, expanded tobacco, and reconstituted tobacco.

[0332] In another aspect, this disclosure provides a Cannabis blend comprising Cannabis material. A Cannabis blend can comprise any combination of fermented Cannabis, unfermented Cannabis, expanded Cannabis, and reconstituted Cannabis.

[0333] In an aspect, a tobacco blend comprises at least 5% cured tobacco by weight. In an aspect, a tobacco blend comprises at least 10% cured tobacco by weight. In an aspect, a tobacco blend comprises at least 15% cured tobacco by weight. In an aspect, a tobacco blend comprises at least 20% cured tobacco by weight. In an aspect, a tobacco blend comprises at least 25% cured tobacco by weight. In an aspect, a tobacco blend comprises at least 30% cured tobacco by weight. In an aspect, a tobacco blend comprises at least 35% cured tobacco by weight. In an aspect, a tobacco blend comprises at least 40% cured tobacco by weight. In an aspect, a tobacco blend comprises at least 45% cured tobacco by weight. In an aspect, a tobacco blend comprises at least 50% cured tobacco by weight. In an aspect, a tobacco blend comprises at least 55% cured tobacco by weight. In an aspect, a tobacco blend comprises at least 60% cured tobacco by weight. In an aspect, a tobacco blend comprises at least 65% cured tobacco by weight. In an aspect, a tobacco blend comprises at least 70% cured tobacco by weight. In an aspect, a tobacco blend comprises at least 75% cured tobacco by weight. In an aspect, a tobacco blend comprises at least 80% cured tobacco by weight. In an aspect, a tobacco blend comprises at least 85% cured tobacco by weight. In an aspect, a tobacco blend comprises at least 90% cured tobacco by weight. In an aspect, a tobacco blend comprises at least 95% cured tobacco by weight.

[0334] In an aspect, a Cannabis blend comprises at least 5% Cannabis by weight. In an aspect, a Cannabis blend comprises at least 10% Cannabis by weight. In an aspect, a Cannabis blend comprises at least 15% Cannabis by weight. In an aspect, a Cannabis blend comprises at least 20% Cannabis by weight. In an aspect, a Cannabis blend comprises at least 25% Cannabis by weight. In an aspect, a Cannabis blend comprises at least 30% Cannabis by weight. In an aspect, a Cannabis blend comprises at least 35% Cannabis by weight. In an aspect, a Cannabis blend comprises at least 40% Cannabis by weight. In an aspect, a Cannabis blend comprises at least 45% Cannabis by weight. In an aspect, a Cannabis blend comprises at least 50% Cannabis by weight. In an aspect, a Cannabis blend comprises at least 55% Cannabis by weight. In an aspect, a Cannabis blend comprises at least 60% Cannabis by weight. In an aspect, a Cannabis blend comprises at least 65% Cannabis by weight. In an aspect, a Cannabis blend comprises at least 70% Cannabis by weight. In an aspect, a Cannabis blend comprises at least 75% Cannabis by weight. In an aspect, a Cannabis blend comprises at least 80% Cannabis by weight. In an aspect, a Cannabis blend comprises at least 85% Cannabis by weight. In an aspect, a Cannabis blend comprises at least 90% Cannabis by weight. In an aspect, a Cannabis blend comprises at least 95% Cannabis by weight.

[0335] In an aspect, a tobacco blend comprises at least 5% cured tobacco by volume. In an aspect, a tobacco blend comprises at least 10% cured tobacco by volume. In an aspect, a tobacco blend comprises at least 15% cured tobacco by volume. In an aspect, a tobacco blend comprises at least 20% cured tobacco by volume. In an aspect, a tobacco blend comprises at least 25% cured tobacco by volume. In an aspect, a tobacco blend comprises at least 30% cured tobacco by volume. In an aspect, a tobacco blend comprises at least 35% cured tobacco by volume. In an aspect, a tobacco blend comprises at least 40% cured tobacco by volume. In an aspect, a tobacco blend comprises at least 45% cured tobacco by volume. In an aspect, a tobacco blend comprises at least 50% cured tobacco by volume. In an aspect, a tobacco blend comprises at least 55% cured tobacco by volume. In an aspect, a tobacco blend comprises at least 60% cured tobacco by volume. In an aspect, a tobacco blend comprises at least 65% cured tobacco by volume. In an aspect, a tobacco blend comprises at least 70% cured tobacco by volume. In an aspect, a tobacco blend comprises at least 75% cured tobacco by volume. In an aspect, a tobacco blend comprises at least 80% cured tobacco by volume. In an aspect, a tobacco blend comprises at least 85% cured tobacco by volume. In an aspect, a tobacco blend comprises at least 90% cured tobacco by volume. In an aspect, a tobacco blend comprises at least 95% cured tobacco by volume.

[0336] In an aspect, a Cannabis blend comprises at least 5% Cannabis by volume. In an aspect, a Cannabis blend comprises at least 10% Cannabis by volume. In an aspect, a Cannabis blend comprises at least 15% Cannabis by volume. In an aspect, a Cannabis blend comprises at least 20% Cannabis by volume. In an aspect, a Cannabis blend comprises at least 25% Cannabis by volume. In an aspect, a Cannabis blend comprises at least 30% Cannabis by volume. In an aspect, a Cannabis blend comprises at least 35% Cannabis by volume. In an aspect, a Cannabis blend comprises at least 40% Cannabis by volume. In an aspect, a Cannabis blend comprises at least 45% Cannabis by volume. In an aspect, a Cannabis blend comprises at least 50% Cannabis by volume. In an aspect, a Cannabis blend comprises at least 55% Cannabis by volume. In an aspect, a Cannabis blend comprises at least 60% Cannabis by volume. In an aspect, a Cannabis blend comprises at least 65% Cannabis by volume. In an aspect, a Cannabis blend comprises at least 70% Cannabis by volume. In an aspect, a Cannabis blend comprises at least 75% Cannabis by volume. In an aspect, a Cannabis blend comprises at least 80% Cannabis by volume. In an aspect, a Cannabis blend comprises at least 85% Cannabis by volume. In an aspect, a Cannabis blend comprises at least 90% Cannabis by volume. In an aspect, a Cannabis blend comprises at least 95% Cannabis by volume.

[0337] In an aspect, this disclosure provides a method comprising preparing a tobacco or Cannabis product using cured tobacco or Cannabis material from a modified tobacco or Cannabis plant, where the modified tobacco or Cannabis plant comprises a recombinant DNA construct comprising a heterologous promoter operably linked to a nucleic acid encoding at least one small RNA molecule capable of binding to and reducing the expression of a nucleic acid sequence encoding a polypeptide involved in the biosynthesis of at least one terpene.

### EMBODIMENTS

[0338] The following examples of non-limiting embodiments are envisioned:
[0339] 1. A modified tobacco or Cannabis plant, tobacco or Cannabis seed, or part thereof comprising a recombinant nucleic acid molecule comprising a nucleic acid sequence encoding a polypeptide involved in the biosynthesis of at least one terpene operably linked to a heterologous promoter.
[0340] 2. A modified tobacco or Cannabis plant, tobacco or Cannabis seed, or part thereof comprising at least one non-natural mutation in an endogenous gene encoding a polypeptide involved in the biosynthesis of at least one terpene, where the modified tobacco or Cannabis plant exhibits increased mRNA expression of the endogenous gene or increased accumulation of the polypeptide as compared to a control tobacco or Cannabis plant lacking the at least one non-natural mutation when grown under comparable conditions.
[0341] 3. A modified tobacco or Cannabis plant, tobacco or Cannabis seed, or part thereof, comprising a recombinant DNA construct comprising a heterologous promoter operably linked to a nucleic acid encoding at least one small RNA molecule capable of binding to and reducing the expression of a nucleic acid sequence encoding a polypeptide involved in the biosynthesis of at least one terpene.
[0342] 4. The modified tobacco or Cannabis plant, tobacco or Cannabis seed, or part thereof of any one of embodiments [0059]-3, where the polypeptide is selected from the group consisting of geranyl diphosphate synthase (GDP), limonene synthase (LS), limonene 3-hydroxylase (L30H), isopiperitenol dehydrogenase (IPD), pulegone reductase, menthofuran synthase (MFS), geranylgeranyl diphosphate synthase (GGPPS), neomenthol dehydrogenase (NtNMD), phylloplanin, premnaspirodiene oxygenase (PSO), kolavenyl diphosphate synthase (KPS), solanesyl phosphate synthase 3, terpene synthase 10-like, and germacrene D synthase.
[0343] 5. The modified tobacco or Cannabis plant, tobacco or Cannabis seed, or part thereof of any one of embodiments [0059]-3, where the at least one terpene is menthol or a related compound.
[0344] 6. The modified tobacco or Cannabis plant, tobacco or Cannabis seed, or part thereof of any one of embodiments [0059]-3, where the polypeptide is selected from the group consisting of geranylgeranyl diphosphate synthase (GGPPS2), 8-hydroxy-copalyl diphosphate synthase, and cis-abienol synthase.
[0345] 7. The modified tobacco or Cannabis plant, tobacco or Cannabis seed, or part thereof of embodiment 6, where the cis-abienol synthase is selected from the group consisting of cis-abienol synthase ISOFORM1 and cis-abienol synthase ISOFORM2.
[0346] 8. The modified tobacco or Cannabis plant, tobacco or Cannabis seed, or part thereof of any one of embodiments [0059]-3, where the at least one terpene is a labdanoid.
[0347] 9. The modified tobacco or Cannabis plant, tobacco or Cannabis seed, or part thereof of any one of embodiments [0059]-3, where the at least one terpene is neophytadiene.
[0348] 10. The modified tobacco or Cannabis plant, tobacco or Cannabis seed, or part thereof of embodiment 8, where the labdanoid is cis-abienol.
[0349] 11. The modified tobacco or Cannabis plant, tobacco or Cannabis seed, or part thereof of any one of embodiments [0059]-3, where the polypeptide is cembratrienol synthase 2a.
[0350] 12. The modified tobacco or Cannabis plant, tobacco or Cannabis seed, or part thereof of any one of embodiments [0059]-3, where the at least one terpene is cembratrienediol.
[0351] 13. The modified tobacco or Cannabis plant, tobacco or Cannabis seed, or part thereof of any one of embodiments [0059]-3, where the polypeptide is levopimaradiene synthetase.
[0352] 14. The modified tobacco or Cannabis plant, tobacco or Cannabis seed, or part thereof of any one of embodiments [0059]-3, where the at least one terpene is levopimaric acid.
[0353] 15. The modified tobacco or Cannabis plant, tobacco or Cannabis seed, or part thereof of any one of embodiments [0059]-3, where the polypeptide is selected from the group consisting of 2-isopropylmalate synthetase (IPS), 2-oxoisovalerate dehydrogenase, and 2-alkenal reductase.
[0354] 16. The modified tobacco or Cannabis plant, tobacco or Cannabis seed, or part thereof of any one of embodiments [0059]-3, where the at least one terpene is L-leucine.
[0355] 17. The modified tobacco or Cannabis plant, tobacco or Cannabis seed, or part thereof of embodiment [0059], where the nucleic acid sequence comprises a sequence at least 70% identical to a nucleic acid sequence selected from the group consisting of SEQ ID NOs: 1-21, 112-125, 155, 158, and 176-190.
[0356] 18. The modified tobacco or Cannabis plant, tobacco or Cannabis seed, or part thereof of embodiment 2, where the endogenous gene comprises a sequence at least 70% identical to a nucleic acid sequence selected from the group consisting of SEQ ID NOs: 22-42, 126-139, 156, 159, and 161-175.
[0357] 19. The modified tobacco or Cannabis plant, tobacco or Cannabis seed, or part thereof of any one of embodiments [0059]-3, where the polypeptide comprises an amino acid sequence at least 70% identical or similar to an amino acid sequence selected from the group consisting of SEQ ID NOs: 43-63, 140-153, 157, 160, and 191-205.
[0358] 20. The modified tobacco or Cannabis plant, tobacco or Cannabis seed, or part thereof of any one of embodiments [0059]-3, where the heterologous promoter comprises a constitutive promoter.
[0359] 21. The modified tobacco or Cannabis plant, tobacco or Cannabis seed, or part thereof of any one of embodiments [0059]-3, where the heterologous promoter comprises a tissue-preferred promoter or tissue-specific promoter.
[0360] 22. The modified tobacco or Cannabis plant, tobacco or Cannabis seed, or part thereof of embodiment 21, where the tissue-preferred promoter or tissue-specific promoter comprises a trichome-preferred promoter or a trichome-specific promoter.
[0361] 23. The modified tobacco or Cannabis plant, tobacco or Cannabis seed, or part thereof of any one of embodiments [0059]-3, where the heterologous promoter comprises a nucleic acid sequence at least 90% identical to SEQ ID NOs: 104-111, 206-208, or a functional fragment thereof.
[0362] 24. The modified tobacco or Cannabis plant, tobacco or Cannabis seed, or part thereof of embodiment [0059], where the modified tobacco or Cannabis plant comprises an increased amount of the at least one terpene as compared to a control tobacco or Cannabis plant lacking the recombinant nucleic acid molecule when grown under comparable conditions.
[0363] 25. The modified tobacco or Cannabis plant, tobacco or Cannabis seed, or part thereof of embodiment 2, where the modified tobacco or Cannabis plant comprises an increased amount of the at least one terpene as compared to the control tobacco or Cannabis plant.
[0364] 26. The modified tobacco or Cannabis plant, tobacco or Cannabis seed, or part thereof of embodiment 24 or 25, where the increased amount of the at least one terpene comprises an increase of at least 5% as compared to the control tobacco or Cannabis plant.
[0365] 27. The modified tobacco plant, tobacco seed, or part thereof of any one of embodiments [0059]-3, where the tobacco plant, tobacco seed, or part thereof is of a tobacco variety selected from the group consisting of a flue-cured variety, a bright variety, a Burley variety, a Virginia variety, a Maryland variety, a dark variety, a Galpão variety, an Oriental variety, and a Turkish variety.
[0366] 28. The modified tobacco or Cannabis plant, tobacco or Cannabis seed, or part thereof of any one of embodiments [0059]-3, where the tobacco or Cannabis plant is male sterile or cytoplasmically male sterile.
[0367] 29. The modified tobacco or Cannabis plant, tobacco or Cannabis seed, or part thereof, of embodiment 2, where the modified tobacco or Cannabis plant, tobacco or Cannabis seed, or part thereof is homozygous for the at least one non-natural mutation.
[0368] 30. The modified tobacco or Cannabis plant, tobacco or Cannabis seed, or part thereof, of embodiment 2, where the modified tobacco or Cannabis plant, tobacco or Cannabis seed, or part thereof is heterozygous for the at least one non-natural mutation.
[0369] 31. The modified tobacco or Cannabis plant, tobacco or Cannabis seed, or part thereof, of embodiment 2, where the at least one non-natural mutation comprises a mutation selected from the group consisting of an insertion, a deletion, a substitution, a duplication, and an inversion.
[0370] 32. The modified tobacco or Cannabis plant, tobacco or Cannabis seed, or part thereof, of embodiment 2, where the at least one non-natural mutation comprises at least one mutation selected from the group consisting of a nonsense mutation, a missense mutation, a frameshift mutation, a splice-site mutation, and any combination thereof.
[0371] 33. The modified tobacco or Cannabis plant, tobacco or Cannabis seed, or part thereof, of embodiment 2, where the at least one non-natural mutation comprises a null mutation.
[0372] 34. The modified tobacco or Cannabis plant, tobacco or Cannabis seed, or part thereof, of embodiment 2, where the at least one non-natural mutation results in a truncation of the polypeptide.
[0373] 35. The modified tobacco or Cannabis plant, tobacco or Cannabis seed, or part thereof, of embodiment 2, where the at least one non-natural mutation comprises a mutation in a sequence region selected from the group consisting of a promoter, a 5′-untranslated region (UTR), an exon, an intron, a 3′ -UTR, and a terminator.
[0374] 36. Cured tobacco material or Cannabis material from the modified tobacco or Cannabis plant, tobacco or Cannabis seed, or part thereof of any one of embodiments [0059]-35.
[0375] 37. The cured tobacco material of embodiment 36, where the cured tobacco material is made by a curing process selected from the group consisting of flue curing, air curing, fire curing, and sun curing.
[0376] 38. A tobacco product comprising the cured tobacco material or the Cannabis material of embodiment 36 or 37, where the tobacco or Cannabis product is selected from the group consisting of a kretek, a bidi cigarette, a cigarillo, a non-ventilated recess filter cigarette, a vented recess filter cigarette, a cigar, snuff, pipe tobacco, pipe Cannabis, cigar tobacco, cigar Cannabis, cigarette tobacco, cigarette Cannabis, chewing tobacco, leaf tobacco, hookah tobacco, hookah Cannabis, shredded tobacco, shredded Cannabis, cut tobacco, and cut Cannabis.
[0377] 39. The tobacco or Cannabis product of embodiment 38, where the tobacco or Cannabis product is a smokeless tobacco or Cannabis product.
[0378] 40. The tobacco or Cannabis product of embodiment 39, where the smokeless tobacco or Cannabis product is selected from the group consisting of loose leaf chewing tobacco, loose leaf chewing Cannabis, plug chewing tobacco, plug chewing Cannabis, moist snuff, nasal snuff, dry snuff, and snus.
[0379] 41. A reconstituted tobacco or Cannabis comprising the cured tobacco material or the Cannabis material of embodiment 36 or 37.
[0380] 42. A fermented tobacco or a fermented Cannabis comprising the cured tobacco material or the Cannabis material of embodiment 36 or 37.
[0381] 43. The tobacco or Cannabis product of embodiment 38, where the tobacco or Cannabis product comprises reconstituted tobacco or reconstituted Cannabis.
[0382] 44. The tobacco or Cannabis product of embodiment 38, where the tobacco or Cannabis product comprises fermented tobacco or fermented Cannabis.
[0383] 45. A recombinant nucleic acid molecule comprising a nucleic acid sequence encoding a polypeptide involved in the biosynthesis of at least one terpene operably linked to a heterologous promoter.
[0384] 46. A method of producing a modified tobacco or Cannabis plant comprising: (a) introducing a recombinant nucleic acid molecule to at least one tobacco or Cannabis cell, where the recombinant nucleic acid molecule comprises a nucleic acid sequence encoding a polypeptide involved in terpene biosynthesis operably linked to a heterologous promoter; (b) selecting at least one tobacco or Cannabis cell comprising the recombinant nucleic acid molecule; and (c) regenerating a modified tobacco or Cannabis plant from the at least one tobacco or Cannabis cell selected in step (b) where the modified tobacco or Cannabis plant comprises an increased amount of at least one terpene in at least one tissue as compared to a control tobacco or Cannabis plant lacking the recombinant nucleic acid molecule when grown under comparable conditions.
[0385] 47. A method of producing a modified tobacco or Cannabis plant comprising: (a) inducing at least one non-natural mutation in at least one tobacco or Cannabis cell in an endogenous gene encoding a polypeptide involved in terpene biosynthesis; (b) selecting at least one tobacco or Cannabis plant comprising the at least one non-natural mutation from step (a); and (c) regenerating a modified tobacco or Cannabis plant from the at least one tobacco or Cannabis cell selected in step (b), where the modified tobacco or Cannabis plant comprises an increased amount of at least one terpene in at least one tissue as compared to a control tobacco or Cannabis plant lacking the at least one non-natural mutation when grown under comparable conditions.
[0386] 48. A method of producing a modified tobacco or Cannabis plant comprising: (a) introducing a recombinant DNA construct to at least one tobacco or Cannabis cell, where said recombinant DNA construct comprises a heterologous promoter operably linked to a nucleic acid encoding at least one small RNA molecule capable of binding to and reducing the expression of a nucleic acid sequence encoding a polypeptide involved in the biosynthesis of at least one terpene; (b) selecting at least one tobacco or Cannabis cell comprising said recombinant DNA construct; and (c) regenerating at least one modified tobacco or Cannabis plant from said at least one tobacco or Cannabis cell selected in step (b), where the modified tobacco or Cannabis plant comprises a reduced amount of at least one terpene in at least one tissue as compared to a control tobacco or Cannabis plant lacking the recombinant DNA construct when grown under comparable conditions.
[0387] 49. A method comprising preparing a tobacco or Cannabis product using cured tobacco material from a modified tobacco or Cannabis plant, where the modified tobacco or Cannabis plant comprises a recombinant nucleic acid molecule comprising a nucleic acid sequence encoding a polypeptide involved in the biosynthesis of at least one terpene operably linked to a heterologous promoter.
[0388] 50. A method comprising preparing a tobacco or Cannabis product using cured tobacco or Cannabis material from a modified tobacco or Cannabis plant, where the modified tobacco or Cannabis plant comprises at least one non-natural mutation in an endogenous gene encoding a polypeptide involved in the biosynthesis of at least one terpene, where the modified tobacco or Cannabis plant exhibits increased mRNA expression of the endogenous gene or increased accumulation of the polypeptide as compared to a control tobacco or Cannabis plant lacking the at least one non-natural mutation when grown under comparable conditions.
[0389] 51. A method comprising preparing a tobacco or Cannabis product using cured tobacco or Cannabis material from a modified tobacco or Cannabis plant, where the modified tobacco or Cannabis plant comprises a recombinant DNA construct comprising a heterologous promoter operably linked to a nucleic acid encoding at least one small RNA molecule capable of binding to and reducing the expression of a nucleic acid sequence encoding a polypeptide involved in the biosynthesis of at least one terpene.
[0390] 52. A method comprising transforming a tobacco or Cannabis cell with a recombinant nucleic acid molecule, where the recombinant nucleic acid molecule comprising a nucleic acid sequence encoding a polypeptide involved in the biosynthesis of at least one terpene operably linked to a heterologous promoter.
[0391] 53. A method comprising transforming a tobacco or Cannabis cell with a recombinant nucleic acid molecule, where the recombinant nucleic acid molecule comprises a heterologous promoter operably linked to a nucleic acid encoding at least one small RNA molecule capable of binding to and reducing the expression of a nucleic acid sequence encoding a polypeptide involved in the biosynthesis of at least one terpene.
[0392] 54. A method for producing a tobacco or Cannabis plant, the method comprising: (a) crossing at least one tobacco or Cannabis plant of a first tobacco variety with at least one tobacco or Cannabis plant of a second tobacco or Cannabis variety to produce at least one progeny tobacco or Cannabis seed, where the at least one tobacco or Cannabis plant of the first tobacco or Cannabis variety comprises a recombinant nucleic acid molecule comprising a nucleic acid sequence encoding a polypeptide involved in the biosynthesis of at least one terpene operably linked to a heterologous promoter; and (b) selecting for at least one progeny tobacco or Cannabis seed, or a plant germinated therefrom, where the at least one progeny tobacco or Cannabis seed or plant germinated therefrom comprises the recombinant nucleic acid molecule.
[0393] 55. A method for producing a tobacco or Cannabis plant, the method comprising: (a) crossing at least one tobacco or Cannabis plant of a first tobacco or Cannabis variety with at least one tobacco plant of a second tobacco or Cannabis variety to produce at least one progeny tobacco or Cannabis seed, wherein the at least one tobacco or Cannabis plant of the first tobacco or Cannabis variety comprises a recombinant nucleic acid molecule comprising a heterologous promoter operably linked to a nucleic acid encoding at least one small RNA molecule capable of binding to and reducing the expression of a nucleic acid sequence encoding a polypeptide involved in the biosynthesis of at least one terpene; and (b) selecting for at least one progeny tobacco seed, or a plant germinated therefrom, wherein the at least one progeny tobacco or Cannabis seed or plant germinated therefrom comprises the recombinant nucleic acid molecule.
[0394] 56. A method for producing a tobacco or Cannabis plant, the method comprising: (a) crossing at least one tobacco or Cannabis plant of a first tobacco variety with at least one tobacco or Cannabis plant of a second tobacco or Cannabis variety to produce at least one progeny tobacco or Cannabis seed, where the at least one tobacco or Cannabis plant of the first tobacco variety comprises at least one non-natural mutation in an endogenous gene encoding a polypeptide involved in the biosynthesis of at least one terpene, where the at least one tobacco or Cannabis plant of the first tobacco or Cannabis variety exhibits increased mRNA expression of the endogenous gene or increased accumulation of the polypeptide as compared to a control tobacco or Cannabis plant of the first tobacco or Cannabis variety lacking the at least one non-natural mutation when grown under comparable conditions; and (b) selecting for at least one progeny tobacco or Cannabis seed, or a plant germinated therefrom, where the at least one progeny tobacco or Cannabis seed or plant germinated therefrom comprises the at least one non-natural mutation.
[0395] 57. The method of any one of embodiments 54-56, where the first tobacco variety and the second tobacco variety are the same tobacco variety, or the first Cannabis variety and the second Cannabis variety are the same Cannabis variety.
[0396] 58. The method of any one of embodiments 54-55, where the at least one tobacco or Cannabis plant of a second tobacco or Cannabis variety comprises the recombinant nucleic acid molecule.
[0397] 59. The method of any one of embodiments 54-55, where the at least one progeny tobacco or Cannabis seed, or the plant germinated therefrom, is heterozygous for the recombinant nucleic acid molecule.
[0398] 60. The method of any one of embodiments 54-55, where the at least one progeny tobacco or Cannabis seed, or the plant germinated therefrom, is homozygous for the recombinant nucleic acid molecule.
[0399] 61. The method of embodiment 56, where the at least one tobacco or Cannabis plant of a second tobacco or Cannabis variety comprises the at least one non-natural mutation.
[0400] 62. The method of embodiment 56, where the at least one progeny tobacco or Cannabis seed, or the plant germinated therefrom, is heterozygous for the at least one non-natural mutation.
[0401] 63. The method of embodiment 56, where the at least one progeny tobacco or Cannabis seed, or the plant germinated therefrom, is homozygous for the at least one non-natural mutation.

[0402] Having now generally described the disclosure, the same will be more readily understood through reference to the following examples that are provided by way of illustration, and are not intended to be limiting of the present disclosure, unless specified.

### EXAMPLES

### Example 1. Identification of Candidate Trichome/Terpenoid Genes

[0403] Proteins that carry out the biosynthetic steps for producing for several terpenes (see FIGS. 1-6) are largely unknown. Published genes involved in terpene biosynthesis were used as a query in a National Center for Biotechnology Information (NCBI) database. Resulting sequences were then extracted from a second, internal database. This methodology produced gene candidates and homologs putatively involved in terpene biosynthesis (SEQ ID NOs: 1-63, 112-153, and 155-205. See Table 1.

### Example 2. Examination of Native Expression of Candidate Genes

[0404] Expression profiles of the candidate genes identified in Example 1 are examined in tobacco trichomes. See FIG. 7. Trichomes are isolated from mature leaves of tobacco cultivar ‘TN90’ by brushing a leaf with a brush dipped in liquid nitrogen. Trichomes are collected into a receptacle containing liquid nitrogen for RNA extraction. Total RNA is isolated using TRIzol™, and cDNA is synthesized using methods known in the art. PCR is performed using gene specific primers. Candidate genes for evaluation include cyclase (SEQ ID NO: 17); phylloplanin (SEQ ID NO: 155); premnaspirodiene oxygenase (PSO) (SEQ ID NO: 158); neomenthol dehydrogenase (SEQ ID NO: 15); and cis-abienol synthase (SEQ ID NO: 4). CYP71D16 is a tobacco trichome-specific P450 hydroxylase gene, used as a positive control for trichome gene expression. CYP71D16 shares approximately 98.5% homology with PSO.

### Example 3. Examination of NMD and ABS Expression Profiles

[0405] Expression profiles of the candidate genes identified in Example 1 are examined in flowers and leaves from tobacco cultivars TN90 and K326 and N. benthamiana at various stages of tobacco plant development.

[0406] Neomenthol dehydrogenase (NMD; SEQ ID NO: 15) and cis-abienol (ABS) isoforms 1 (SEQ ID NO: 4) and 2 (SEQ ID NO: 5) transcript abundance is performed using RNA sequencing at different stages of plant development in TN90 and K326 tobacco cultivars.

[0407] Approximately 22 to 25 plants per variety are grown in two rows. The experiment is triplicated with randomized design. Because flowering time varies from plant to plant, all plants are topped when at least 50% of the plants start to flower. Plants close to uniform sizes are selected for sampling at different time points. Assessed plant samples include flower (before topping) and leaf at a variety of post topping stages (e.g., 1 day post-topping; 3 days post-topping; 1 week post-topping; 2 weeks post-topping; 3 weeks post-topping; and harvest stage). See FIGS. 8 and 9.

### Example 4. Vector Constructs for Generating Modified Tobacco or Cannabis Plants

[0408] Candidate genes identified in Example 1 encoding enzymes in the cis-abienol biosynthetic pathway (e.g., geranylgeranyl diphosphate synthase (GGPPS2) (SEQ ID NOs: 1 and 113), 8-hydroxy-copalyl diphosphate synthase (SEQ ID NOs: 3 and 115), cis-abienol synthase isoform 1 (SEQ ID NO:4), and cis-abienol synthase isoform 2 (SEQ ID NO: 5)) are cloned into constructs.

[0409] Separate transformation vectors comprising one each of SEQ ID NOs: 1-21, 112-125, 155, 158, and 176-190 under the control of a CaMV 35S promoter are constructed using methods known in the art and vector pGWB551 (SEQ ID NO: 154). A representative vector construct used to transform tobacco or Cannabis plants is depicted in FIG. 10. A map of the vector backbone used to make the vector constructs is depicted in FIG. 11.

[0410] Each vector construct generated is separately transformed into tobacco or Cannabis cells in separate experiments, using methods standard in the art. Briefly, vectors are introduced into tobacco or Cannabis leaf discs via Agrobacterium-mediated transformation. See, for example, Mayo et al., Nat. Protoc., 1:1105-1111 (2006); and Horsch et al., Science, 227:1229-1231 (1985).

[0411] Representative images of calli from control and transgenic tobacco lines expressing GFP in different backgrounds (Nb=N. benthamiana; TN90=tobacco cultivar ‘TN90’) are provided in FIGS. 12-18. FIG. 12 depicts geranylgeranyl diphosphate synthase-TN90 (SEQ ID NOs: 1 and 43); FIG. 13 depicts geranylgeranyl diphosphate synthase-Nb (SEQ ID NOs: 1 and 43); FIG. 14 depicts cembratrienol synthase 2a-Nb (SEQ ID NOs: 17 and 59); FIG. 15 depicts neomenthol dehydrogenase-Nb (SEQ ID NOs: 15 and 57); FIG. 16 depicts cis-abienol synthase-TN90 (SEQ ID NOs: 4 and 46); FIG. 17 depicts menthofuran synthase-Nb (SEQ ID NOs: 16 and 58); and FIG. 18 depicts GFP-TN90, a positive control.

### Example 5. Regeneration of Modified Tobacco Plants

[0412] Tobacco genotypes (TN90 and K326) and N. benthamiana plants are transformed with vector constructs as described in Example 4 are grown in Magenta™ GA-7 boxes and leaf discs are cut and placed into Petri plates. Agrobacterium tumefaciens cells comprising a transformation vector are collected by centrifuging a 20 mL cell suspension in a 50 mL centrifuge tube at 3500 RPM for 10 minutes. The supernatant is removed, and the Agrobacterium tumefaciens cell pellet is re-suspended in 40 mL liquid re-suspension medium. Tobacco leaves, avoiding the midrib, are cut into eight 0.6 cm discs with a #15 razor blade and placed upside down in a Petri plate. A thin layer of Murashige & Skoog (MS) with B5 vitamin liquid re-suspension medium is added to the Petri plate and the leaf discs are poked uniformly with a fine point needle. About 25 mL of the Agrobacterium tumefaciens suspension is added to the Petri plate and the leaf discs are incubated in the suspension for 10 minutes.

[0413] Leaf discs are transferred to co-cultivation Petri plates (½ MS medium) and discs are placed upside down in contact with filter paper overlaid on the co-cultivation TOM medium (MS medium with 30 g/L sucrose; 0.1 mg/L indole-3-acetic acid; and 1 mg/L 6-benzyl aminopurine (BAP)). The Petri plate is sealed with parafilm prior to incubation in dim light (between 60 and 80 mE/ms) with photoperiods of 18 hours light, 6 hours dark, at 24° C. for two days.

[0414] After incubation, leaf discs are transferred to regeneration/selection TOM Hyg medium Petri plates (TOM medium plus 200 mg/L cefotaxime and 50 mg/L hygromycin). Leaf discs are sub-cultured bi-weekly to fresh TOM K medium in dim light (between 60 and 80 mE/ms) with photoperiods of 18 hours light, 6 hours dark, at 24° C. until shoots become excisable. Shoots from leaves are removed with forceps and inserted in MS rooting medium (MS Gamborg B5, 3 g/L sucrose and 7 g/L dextrose) with 50 mg/L hygromycin and 200 mg/L cefotaxime. Shoots on MS rooting medium with 50 mg/L hygromycin and 200 mg/L cefotaxime are incubated under light (approximately 60-80 mE/ms) with photoperiods of 18 hours light, 6 hours dark, at 24° C. to induce rooting.

[0415] When plantlets comprising both shoots and roots grow large enough (e.g., over half the height of a Magenta™ GA-7 box), they are transferred to Jiffy peat pellet for acclimatization in the growth room. Once established, seedlings are transferred to a greenhouse for further growth, breeding, and analysis.

### Example 6. Confirming Expression of Terpene Biosynthesis Genes in Modified Tobacco Plants

[0416] RNA is isolated from young leaves of modified tobacco plants (To generation) generated in Example 5 during the vegetative stage of growth. RNA is also isolated from control tobacco plants lacking the recombinant nucleic acid constructs grown under comparable conditions. Total RNA is isolated using TRIzol™, and cDNA is synthesized using methods known in the art. Terpenoid gene expression in different transgenic lines of each gene construct is quantified via quantitative real-time PCR (qRT-PCR). Primers specific for candidate genes are provided in Table 1 (SEQ ID NOs: 64-103).

[0417] Gene expression of NtNMD (SEQ ID NO: 15), NtaABS (SEQ ID NO: 4), and NtABS (SEQ ID NO: 5) in modified tobacco plants is quantified using qRT-PCR and compared to NtNMD, NtaABS, and NtABS expression in control tobacco plants. Relative gene expression of cis-abienol synthase isoform 1 (aABS) (SEQ ID NO: 4) and cis-abienol synthase isoform 2 (ABS) (SEQ ID NO: 5) are calculated for T₀ lines in transgenic tobacco plants. See FIGS. 19-20. Relative gene expression of NtNMD (SEQ ID NO: 15) is calculated for T₀ lines in transgenic tobacco plants. See FIG. 21. Relative expression of NtNMD (see FIG. 24) and NtaABS (see FIG. 25) are also examined in T₁ transgenic tobacco plants. Relative expression is determined using 2^{(-ΔΔc}^{₍ₜ₎}⁾ methodology that is standard in the art, where native expression of the overexpressed gene in wildtype plants are used as a baseline (e.g., set to equal 1). See, for example, Livak and Schmittgen, Methods, 25:402-408 (2001).

### Example 7. Measuring Terpenoids in Modified Tobacco Plants Overexpressing Candidate Genes

[0418] Quantitative metabolic profile analysis is performed using T₀ transgenic plants generated in Example 5 during the vegetative growth stage. Leaf samples from young or old leaves, separately, are ground in liquid nitrogen for solvent extraction of terpenes. Ground leaves are mixed with 60:40 hexane: ethyl acetate solvent mixture (v/v) supplemented with heptadecanol as an internal standard and then incubated overnight in a shaker. The solvent extract is concentrated in a refrigerated SpeedVac and placed into a silica column. The column is washed with hexane and allowed to flow through collection tubes. Samples are aliquoted from the flow through and used for gas chromatography mass spectrometry (GC-MS) metabolite analysis.

[0419] Elevated levels of neophytadiene are observed in transgenic tobacco plants overexpressing NtNMD (SEQ TD NO: 15). See FIG. 22. Elevated levels of neophytadiene are also observed in transgenic tobacco plants overexpressing NtABS (SEQ ID NO: 5) and NtaABS (SEQ ID NO: 4). See FIG. 23.

[0420] Neomenthol, as detected by GC-MS, hyperaccumulates in transgenic tobacco plants overexpressing NtNMD (SEQ TD NO: 15), compared to TN9 control plants. See Table 9.

TABLE 9
Accumulation of volatile aromas in NtNMD transgenic tobacco plants

| Plant | Ret.Time | | | |
|---|---|---|---|---|
| sample | (minutes) | Height | Name | Description |
| TN90 old | 19.778 | 175137 | Phytol | acyclic diterpene |
| leaf | | | | alcohol |
| | 21.697 | 7959615 | Thunbergol | diterpene alcohol |
| | 27.779 | 192001 | Squalene | linear triterpene |
| | 30.686 | 1459330 | Campesterol | phytosterols |
| | 30.882 | 3237771 | Stigmasterol | phytosterols |
| TN90 | 21.696 | 2353386 | Thunbergol | diterpene alcohol |
| young | 30.685 | 515667 | Campesterol | phytosterols |
| leaf | 30.88 | 840605 | Stigmasterol | phytosterols |
| NtNMD | 8.72 | 18116 | D-Limonene | cyclic monoterpene |
| old leaf | 21.696 | 796720 | Thunbergol | diterpene alcohol |
| | 22.035 | 2387665 | Phytol | acyclic diterpene |
| | | | | alcohol |
| | 30.685 | 1930116 | Campesterol | phytosterols |
| | 30.882 | 3611696 | Stigmasterol | phytosterols |
| | 31.248 | 1538874 | gamma-Sitosterol | phytosterols |
| | 31.59 | 777680 | beta-Amyrin | pentacyclic |
| | | | | triterpenoid |
| NtNMD | 8.723 | 20209 | D-Limonene | cyclic monoterpene |
| young | 22.224 | 310287 | Neomenthol | monoterpene |
| leaf | 22.53 | 539430 | Caryophyllene | bicyclic |
| | | | oxide | sesquiterpene |
| | 22.607 | 651236 | Phytol | acyclic diterpene |
| | | | | alcohol |
| | 30.688 | 2600761 | Campesterol | phytosterols |
| | 30.884 | 4746148 | Stigmasterol | phytosterols |
| | 31.252 | 2730652 | gamma-Sitosterol | phytosterols |
| | 31.598 | 963961 | alpha-Amyrin | pentacyclic |
| | | | | triterpenoid |

[0421] Enhanced volatile flavor compounds, as detected by GC-MS, accumulate in transgenic tobacco plants overexpressing NtABS (SEQ TD NO: 5) and NtaABS (SEQ TD NO: 4). See Table 10.

TABLE 10
Accumulation of volatile aromas in NtABS and
NtaABS transgenic tobacco plants

| Plant | Ret.Time | | | |
|---|---|---|---|---|
| sample | (minutes) | Height | Name | Description |
| NtABS | 8.781 | 4120018 | Benzyl alcohol | aromatic alcohol |
| young | 10.107 | 1087817 | Phenethyl alcohol | aromatic alcohol |
| leaf | 13.932 | 234315 | Phytol | acyclic diterpene |
| | | | | alcohol |
| | 19.785 | 1028557 | Phytol | acyclic diterpene |
| | | | | alcohol |
| | 19.356 | 37060661 | Neophytadiene | sesquiterpenoids |
| | 21.709 | 2324963 | Thunbergol | diterpene alcohol |
| | 23.862 | 2587845 | Thunbergol | diterpene alcohol |
| | 23.964 | 2979432 | Thunbergol | diterpene alcohol |
| | 27.788 | 2904632 | Squalene | linear precursor to |
| | | | | all triterpenes |
| | 28.394 | 2171239 | Geranylgeraniol | diterpenoid |
| | 30.699 | 9012028 | Campesterol | phytosterols |
| | 30.899 | 18029891 | Stigmasterol | phytosterols |
| NtABS | 8.782 | 2608699 | Benzyl alcohol | aromatic alcohol |
| young | 10.11 | 565512 | Phenethyl alcohol | aromatic alcohol |
| leaf | 13.932 | 34195 | Phytol | acyclic diterpene |
| | | | | alcohol |
| | 19.785 | 845134 | Phytol | acyclic diterpene |
| | | | | alcohol |
| | 19.354 | 34282335 | Neophytadiene | sesquiterpenoids |
| | 27.787 | 2492163 | Squalene | linear precursor to |
| | | | | all triterpenes |
| | 30.698 | 7713903 | Campesterol | phytosterols |
| | 30.898 | 15728977 | Stigmasterol | phytosterols |
| NtaABS | 21.701 | 784815 | Thunbergol | diterpene alcohol |
| old leaf | 22.041 | 1590365 | Phytol | acyclic diterpene |
| | | | | alcohol |
| | 30.695 | 8699080 | Campesterol | phytosterols |
| | 30.896 | 19240212 | Stigmasterol | phytosterols |
| | 10.108 | 288805 | Phenethyl alcohol | aromatic alcohol |
| NtaABS | 20.52 | 2179848 | Squalane | product of squalene |
| young | | | | hydrogenisation |
| leaf | 21.708 | 3797521 | Thunbergol | diterpene alcohol |
| | 22.042 | 4400153 | Phytol | acyclic diterpene |
| | | | | alcohol |
| | | | | product of squalene |
| | 24.24 | 2297502 | Squalane | hydrogenisation |
| | 30.694 | 8477865 | Campesterol | phytosterols |
| | 30.894 | 16841470 | Stigmasterol | phytosterols |
| | 31.26 | 9109415 | gamma-Sitosterol | phytosterols |

### Example 8. Generating Mutations in Candidate Genes

[0422] Mutations are produced in each of the genes identified in Example 1 by specifically editing SEQ ID NOs: 1-42 112-139, 155-156, 158-159, and 161-190, separately, in the tobacco or Cannabis genomes. Tobacco or Cannabis protoplasts are transfected using polyethylene glycol (PEG) with plasmids encoding a CRISPR protein or a CRISPR protein and specific guide RNA (gRNA) targeting individual genes at desired positions.

[0423] Transfected protoplasts are then immobilized in 1% agarose beads and subjected to tissue culture. When calli grow to approximately 1 millimeter in diameter, they are spread on TOM2 plates. Calli are screened for mutations (e.g., insertions or deletions (indels)) at the target positions using fragment analysis. Candidates, showing size shifts compared to wildtype control, are selected for further culture and the consequent shoots are tested by fragment analysis again to confirm the presence of mutations.

[0424] Modified tobacco or Cannabis plants (To generation) are grown as described in Example 5. Then, terpenoid levels are measured as described in Example 7.

### Example 9. Knockdown of Candidate Genes Using Small RNA Molecules in Tobacco and Cannabis

[0425] Reducing the expression of genes identified in Example 1 is tested for their effect on the levels of specific terpenoids.

[0426] Separate transformation vectors comprising an artificial miRNA designed to reduce the transcription or translation of one each of SEQ ID NOs: 1-42, 112-139, 155-156, 158-159, and 161-190 driven by CaMV 35S are constructed.

[0427] Modified tobacco plants (To generation) are grown as described in Example 5. Then, terpenoid levels are measured as described in Example 7.

### Example 10. Expressing Terpenoid Biosynthesis Genes with Trichome-Specific Promoters

[0428] Trichome-specific promoters are used to drive the expression of genes involved in terpenoid biosynthesis. Constructs are produced as described in Example 4, with each trichome-specific promoter (e.g., SEQ ID NOs: 104-111 and 206-208, see Table 1) driving the expression of neomenthol dehydrogenase (NtNMD; SEQ ID NO: 15) or one of two isoforms of cis-abienol synthase (NtaABS(Isoform 1; SEQ ID NO: 4) and NtABS(Isoform 2; SEQ ID NO: 5) or a homolog thereof, for example, cis-abienol synthase (e.g. SEQ ID NO: 119), in separate constructs.

[0429] Each of the constructs are separately transformed into tobacco or Cannabis cells and modified tobacco or Cannabis plants are regenerated as described in Example 5. Modified tobacco or Cannabis plants are tested for terpenes as provided in Example 7.

1. A modified tobacco or Cannabis plant, tobacco or Cannabis seed, or part thereof comprising a recombinant nucleic acid molecule comprising a nucleic acid sequence encoding a polypeptide involved in the biosynthesis of at least one terpene operably linked to a heterologous promoter.

2. A modified tobacco or Cannabis plant, tobacco or Cannabis seed, or part thereof comprising at least one non-natural mutation in an endogenous gene encoding a polypeptide involved in the biosynthesis of at least one terpene, wherein the modified tobacco or Cannabis plant exhibits increased mRNA expression of the endogenous gene or increased accumulation of the polypeptide as compared to a control tobacco or Cannabis plant lacking the at least one non-natural mutation when grown under comparable conditions.

3. A modified tobacco or Cannabis plant, tobacco or Cannabis seed, or part thereof, comprising a recombinant DNA construct comprising a heterologous promoter operably linked to a nucleic acid molecule comprising a nucleic acid sequence encoding at least one small RNA molecule capable of binding to and reducing the expression of a nucleic acid sequence encoding a polypeptide involved in the biosynthesis of at least one terpene.

4. The modified tobacco or Cannabis plant, tobacco or Cannabis seed, or part thereof of claim 1, wherein the polypeptide is selected from the group consisting of geranyl diphosphate synthase (GDP), limonene synthase (LS), limonene 3-hydroxylase (L30H), isopiperitenol dehydrogenase (IPD), pulegone reductase, menthofuran synthase (MFS), geranylgeranyl diphosphate synthase (GGPPS), neomenthol dehydrogenase (NtNMD), phylloplanin, premnaspirodiene oxygenase (PSO), kolavenyl diphosphate synthase (KPS), solanesyl phosphate synthase 3, terpene synthase 10-like, germacrene D synthase, geranylgeranyl diphosphate synthase (GGPPS2), 8-hydroxy-copalyl diphosphate synthase, cis-abienol synthase, cembratrienol synthase 2a, levopimaradiene synthetase, 2-isopropylmalate synthetase (IPS), 2-oxoisovalerate dehydrogenase, and 2-alkenal reductase.

5. The modified tobacco or Cannabis plant, tobacco or Cannabis seed, or part thereof of claim 1, wherein the at least one terpene is selected from the group consisting of menthol or a related compound, a labdanoid, neophytadiene, cembratrienediol, levopimaric acid, and L-leucine.

6. (canceled)

7. The modified tobacco or Cannabis plant, tobacco or Cannabis seed, or part thereof of claim 4, wherein the cis-abienol synthase is selected from the group consisting of cis-abienol synthase ISOFORM1 and cis-abienol synthase ISOFORM2.

8. (canceled)

9. (canceled)

10. The modified tobacco or Cannabis plant, tobacco or Cannabis seed, or part thereof of claim 5, wherein the labdanoid is cis-abienol.

11.-16. (canceled)

17. The modified tobacco or Cannabis plant, tobacco or Cannabis seed, or part thereof of claim 1, wherein the nucleic acid sequence comprises a sequence at least 70% identical to a nucleic acid sequence selected from the group consisting of SEQ ID NOs: 1-21, 112-125, 155, 158, and 176-190.

18. The modified tobacco or Cannabis plant, tobacco or Cannabis seed, or part thereof of claim 2, wherein the endogenous gene comprises a sequence at least 70% identical to a nucleic acid sequence selected from the group consisting of SEQ ID NOs: 22-42, 126-139, 156, 159, and 161-175.

19. The modified tobacco or Cannabis plant, tobacco or Cannabis seed, or part thereof of claim 1, wherein the polypeptide comprises an amino acid sequence at least 70% identical or similar to an amino acid sequence selected from the group consisting of SEQ ID NOs: 43-63, 140-153, 157, 160, and 191-205.

20. The modified tobacco or Cannabis plant, tobacco or Cannabis seed, or part thereof of claim 1, wherein the heterologous promoter comprises a constitutive promoter.

21. The modified tobacco or Cannabis plant, tobacco or Cannabis seed, or part thereof of claim 1, wherein the heterologous promoter comprises a tissue-preferred promoter or tissue-specific promoter.

22. The modified tobacco or Cannabis plant, tobacco or Cannabis seed, or part thereof of claim 21, wherein the tissue-preferred promoter or tissue-specific promoter comprises a trichome-preferred promoter or a trichome-specific promoter.

23. The modified tobacco or Cannabis plant, tobacco or Cannabis seed, or part thereof of claim 1, wherein the heterologous promoter comprises a nucleic acid sequence at least 90% identical to SEQ ID NOs: 104-111, 206-208, or a functional fragment thereof.

24. The modified tobacco or Cannabis plant, tobacco or Cannabis seed, or part thereof of claim 1, wherein the modified tobacco or Cannabis plant comprises an increased amount of the at least one terpene as compared to a control tobacco or Cannabis plant lacking the recombinant nucleic acid molecule when grown under comparable conditions.

25. (canceled)

26. The modified tobacco or Cannabis plant, tobacco or Cannabis seed, or part thereof of claim 24, wherein the increased amount of the at least one terpene comprises an increase of at least 5% as compared to the control tobacco or Cannabis plant.

27. The modified tobacco plant, tobacco seed, or part thereof of claim 1, wherein the tobacco plant, tobacco seed, or part thereof is of a tobacco variety selected from the group consisting of a flue-cured variety, a bright variety, a Burley variety, a Virginia variety, a Maryland variety, a dark variety, a Galpão variety, an Oriental variety, and a Turkish variety.

28. The modified tobacco or Cannabis plant, tobacco or Cannabis seed, or part thereof of claim 1, wherein the tobacco or Cannabis plant is male sterile or cytoplasmically male sterile.

29.-35. (canceled)

36. Cured tobacco material or Cannabis material from the modified tobacco or Cannabis plant, tobacco or Cannabis seed, or part thereof of claim 1.

37. The cured tobacco material of claim 36, wherein the cured tobacco material is made by a curing process selected from the group consisting of flue curing, air curing, fire curing, and sun curing.

38.-63. (canceled)

The application's sequence listing, which the Patent Office published only in electronic form, follows.

SEQUENCE LISTING (208 sequences)

SEQ ID NO: 1 - DNA, 1098 bp, Nicotiana tabacum
atggcatttttggctaccatttctggccatgaaaatatgcttctttccaataccctaaacaataactttattttcagtggaaaacctccacagagacattcttatagtttcctccccaagaaaatccaggccagaagtgttgcaaactcatccaaaacatttcaagtcaaagaagaagaattctcatctaagacagagaaattcatcttgcctaagtttgactttgaagaatatatgaaaatgaaggcaattaaggtaaacaaagcactagatgatgcaataccaatgcaagagcctataaaaattcatgaagccatgagatactcacttctagctgggggaaaacgcgtccggccgatcctatgcatggcttcttgtgaagtagtaggaggggatgaatccttagctattcctgcagcttgctcggttgagatgatccacaccatgtcactcatccacgacgatcttccttgcatggacaacgatgatctacgtcgtggcaagcccacgagccacaaggctttcggggaagacactgcagttctaacaggggatgcacttttgtctttggcctttgaacatgtagcttccaagactaaagatgtgacaccccaaagagtggttcaagccgttggcgaattgggttcagccgttggctcgaaagggcttgtggcggggcagattgtggacatagctagtgagggaaaacaagtgagcctaactgaattagagtacattcacaaccataagacagggaaactattggaggctgctgtggtttgtggggcaataattgggggagggaatgagattgaggtggagagaatgaggaactatgctagatgccttggactgttgtttcaagtggtagatgatattcttgatgttactaagtcatcagaagagttgggaaagacagctggtaaagacctagtgactgataaggctacatatcctaagttgatggggctagaaaaagctcgggagctcgccggagagctggtggctaaggccatggatgagctgagctactttgatgctgccaaggcggcacctctttatcattttgctaattatattgcacatcgccagaattga

SEQ ID NO: 2 - DNA, 1101 bp, Nicotiana sp.
atgaaatctatgaatcttgtcgattcatgggctgctcaagtctgttcagttttcaatcaaaccatacccaataaaaccttcactggattcatgaaaattcctgtgaaaaacccaagttttttgaaacagaaaagaccattttctgctctaagtgtgtcagctattgctaccaaagaagatgagaaagttaaggaagttgaaacacaaaaggagcaattcaatttcaaaacttacgtagctgaaaaggctatttctgtaaataaagctttagatgaggctgttatagtaaaagacccacctgtgatccacgaagcaatgcgctattcacttctcgccggcggcaaaagagtccgaccgatgctctgcctcgccgcctgcgagctcgtcggcggcgaccaatccaacgccatgccggctgcttgcgccgtcgagatgatccacactatgtccctcattcacgacgatttaccttgtatggataacgacgatctccgccgtggaaagccgacgaaccacaaagtctacggcgaggacgtggcggtcctcgccggagactcgctcctcgctttcgccttcgagtacatcgccaccgctaccgccggagtttcaccgtcgaggatcctcgccgccatcggcgaactggcgaaatccatcggaactgaagggttagtagctggacaagtagcggatatagcttgtactggtaaccctaatgttggactcgacacactcgaattcattcacatacacaaaacggcggcgcttctagaagcttccgtagttctcggagcaatcctcggcggcggaacagatgaagaagtggagaaattgaggatattcgcgagatgtattggattattgtttcaagtagtagatgatatactcgatgttacaaagtcgtcggaggtgctcggaaaaaccgccggaaaagatttggcagtagataaaacgacgtatccaaaactgctgggattggaaaaggctaaggaatttgcggcggagctcaaccgagatgctaaacaacagctggtggaatttgatccacacaaagctgctcccttgattgctttggcggattacattgcttatcgtgaaaattag

SEQ ID NO: 3 - DNA, 2394 bp, Nicotiana tabacum
atgcaagtcataattacatcaagtcacaggcttttctgccatcttcatcaacttaagagtcctacatcattgtctgcacaacaagcggagtttaaaaaacatggacccggaaattggttgttccaaactgaaggctcacttctatataaaccacttcgtctcaattgtgcacctagcgatgcaagttatctcggtaatgtgattgagtacttagaatctaatcgctcaaacaactccgaagaaaaggatattcaggtaaacagaaaaatacagatcaaaagtttgacagaagagatcaaacatatgttgaattcgatggaggatggaaggtcaagtgtcttagcctatgaaacagcttgggtttcctttattccgaatactactaataatcagagacctatgtttccatcttgtcttgaatggattatagacaatcaactttgtgatggttcatggggagaggagattgtattatgcatatatgatcgactcttgaacacactagcatgcgttgttgcattgacattatggaacacatgccttcataagagaaacaaaggagtgatctttatcaaagaaaacttaatgaagctagagacggaggaagttgaacatatgacttgtggatttgaacttgtgtttcctgctctccttgagaaagcgaaacaattaggcattgacattccgtatgatgctccagtgttaaaggatatttatgtaaggagagaagtaaagtttacaagaattcctaaagatgttatccatacgattccgacaacagtgttgttttcattagaaggattaagggacgacttggactggcaaaggcttttgaagcttcaaatgcctgatggttcattcttaacatcccctgcttccactgcctttgcattcatggaaacaaatgatgaaacgtgtttggcatatcttcaaaacgttgttcaaaagtgtaatggaggagcgcgacaatacccactcgacatagtaacgcgactttgggcgattgatcgattacaacgccttggaatctcttattattttgcggaagagttcaaggaacttttggatcatgtgttcagatactgggacgaggagaatggaattttctgtggaaggaattcaaacttttttgatgttgatgatacatgcatggctataaggttgctaaggttacatgggtatgatgttagtccagaagcgctaaacaattttaaagatggtgatcaattcttttgccaaagaggtgaagtggacgggtcaccatcacatatgtttaatctctatagatgttcccaagtattattcccaggagaaaagatacttgaagaggcaaagaatttcacttacaacttcttacagcaatgtctagcaaacaatcaatgcttagacaaatgggtcatagccaaggacatccccggggagataaggtatgcacttgaatttccatggtatgctagcttgcctcgggtggaagctaggctttatatagaacagtatggtggtgcagatgatatttggattggcaaaacgttattcagaatgcccgatatcagcaacaatgtttatttacaagctgcaaaattggattacaatagatgccaaagtcaacatcgatttgaatggctgattatgcaacagtggtttgaaaagtgcaacttccaacaatttggaataagcaaaaagtacctcttagtttcttatttcttagctgctgcaagtatatttgaagtcgagaagtcaagagaacgacttgcatgggctaaatctcgtataatatgtaagatgactacatcttactacaatgaaaaagccacaacttggaccactgggaattcattgttgatggaattcaaggattatccgagcagaaataatggtaatgaaacaaaagagatcatagttctcaacaatcttcatcagtttttgcaccaactctcggaagagacttttgaagaccaaggcaaagacatccatcaccaactacaaaaagcatgggaaacgtggttgatgtctttgagggaagaaaaggatacatgccaagaagaagcagagttgttagtgcgcacaattaacctttctggcggccatatgacacatgatgatatactattcgatgcggactacaagaatctgtccaatcttaccaataaagtttgtcacatgcttaatgagatccaaaatgaaaaggtgactggaagctcaaagaccaccaatattgaattcgacatgcaagctcttgtaaagttagtatttggcaacatctcaaacaacatcaaccaagatattaagcaaatcttttttacagttgttaagactttctattacactgcacacgttagtgaggaaataatcaactttcacatatccaaggtactttttcagcaagtccagtaa

SEQ ID NO: 4 - DNA, 2379 bp, Nicotiana tabacum
atggtacttggactgagaagcaaaatcataccacttcctgatcataagttgggaaatatcaaattaggttcagtaaccaatgcaatttgccacagaccatgtagagtaagatgcagccacagtactgcttcatcaatggaagaggcaaaggagagaataagggaaacatttggaaaaatagagctatctccttcttcctatgacacagcatgggtagctatggtcccttcaagatattctatgaaccaaccatgttttcctcagtgcttagattggattcttgaaaatcaaagagaagatggatcttggggcctaaatcctagccatccattgcttgtaaaagactccctttcttccactctagcatctttgcttgcccttcgcaaatggagaattggagataaccaagtccaaagaggccttggctttattgaaacgcatggttgggcagtcgataacaaggatcagatttcacctttaggatttgaaattatatttccctgcatgatcaactatgcagagaaacttaatttggatctacctttggatcctaaccttgtaaatatgatgctctgcgaacgtgaattaacaattgaaagagccttaaagaatgaattcgaggggaatatggcaaatgtagaatattttgctgaagggctcggtgaattatgtcattggaaagagatgatgcttcgtcagagacacaacgggtcgctctttgattcaccagccactactgcagctgccttgatttaccatcagtacgatgagaaatgctttgggtacttgaactcaatcttgaaactgcacgataattgggtccccactatttgccctacaaagatacattcaaatctcttcttagttgatgcccttcaaaatcttggagtagatcggtattttaaaacagaagtcaaaagagtactagatgaaatatacaggctttggctagaaaagaatgaagaaattttttcagacgttgctcattgtgccatggcgtttcgacttttacggatgaataactatgaagtttcctcagaagaacttgaaggatttgtcgaccaagaacatttctttacaacatcaagtgggaaacttatgaatcacgttgcaattctcgaacttcaccgagcttcacaggtggctattcatgaaaggaaagatcacattttagataaaataagtacttggacaaggaattttatggagcaaaaactcttggacaagcacatccctgataggtcaaagaaggagatggaatttgctatgaggaaattttatggcacatttgatcgagtggaaactagacgttacatcgagtcatacaaaatggacagttttaagatcttaaaagcggcttacaggtcttccggtattaacaacatagacttgctaaagttctcagaacacgattttaacttgtgccaaacccgacacaaagaagaacttcaacagatgaaaaggtggttcacagattgcaaactcgaacaagtaggattatcacaacagtacttatacactagttacttcataattgctgccatactctttgaacctgaatatgctgatgctcgtctagcatatgcaaagtacgccataataataacagcggtggatgatttcttcgattgttttatttgcaaagaagaactgcaaaacatcatcgaattagtagagagatgggagggatactcaaccgtcggattccgttcagagagggttagaattttctttttggcactttacaaaatggtagaggaaattgcggcaaaggcggaaactaagcaaggtcgatgtgtcaaagatcaccttattaacttgtggattgatatgttgaagtgtatgctggtggaattggacctttggaaaattaaatcaactaccccaagcatagaggagtacttgtctgttgcatgtgtaactattggtgttccatgttttgttctcacatcactatatcttcttggaccaaaactgtccaaggatgtcatagaaagttctgaggtcagtgccttatgcaattgtacagctgctgtggcccgattgattaatgatatacacagttacaagagagaacaagcagaaagttcaacaaatatggtatcaatattaataacacaaagtcagggaactatctctgaagaagaggctataagacagataaaggaaatgatggaaagtaagagaagagagttgctagggatggttctacaaaataaagaaagccaattgccacaagtgtgcaaggatcttttttggacgacaatcaacgcagcttattctatacatacacatggcgatgggtatcgcttcccagaggaattcaagaaccatatcaacgatgtaatttacaaaccactcaatcaatattccccataa

SEQ ID NO: 5 - DNA, 2064 bp, Nicotiana tabacum
atgatacttggactgagaagcaaaatcataccacttcctgatcataagttgggaaatatcaaattaggttcagtaaccaatgcaatttgccacagaccatgtagagtaagatgcagccacagtactgcttcatcaatggaagaggcaaaggagagaataagggaaacatttggaaaaatagagctatctccttcttcctatgacacagcatgggtagctatggtcccttcaagatattctatgaaccaaccatgttttcctcagtgcttagattggattcttgaaaatcaaagagaagatggatcttggggcctaaatcctagccatccattgcttgtaaaagactccctttcttccactctagcatctttgcttgcccttcgcaaatggagaattggagataaccaagtccaaagaggccttggctttattgaaacgcatggttgggcagtcgataacaaggatcagatttcacctttaggatttgaaattatatttccctgcatgatcaactatgcagagaaacttaatttggatctacctttggatcctaaccttgtaaatatgatgctctgcgaacgtgaattaacaattgaaagagccttaaagaatgaattcgaggggaatatggcaaatgtagaatattttgctgaagggctcggtgaattatgtcattggaaagagatgatgcttcgtcagagacacaacgggtcgctctttgattcaccagccactactgcagctgccttgatttaccatcagtacgatgagaaatgctttgggtacttgaactcaatcttgaaactgcacgataattgggtccccactatttgccctacaaagatacattcaaatctcttcttagttgatgcccttcaaaatcttggagtagatcggtattttaaaacagaagtcaaaagagtactagatgaaatatacaggctttggctagaaaagaatgaagaaattttttcagacgttgctcattgtgccatggcgtttcgacttttacggatgaataactatgaagtttcctcagaagaacttgaaggatttgtcgaccaagaacatttctttacaacatcaagtgggaaacttatgaatcacgttgcaattctcgaacttcaccgagcttcacaggtggctattcatgaaaggaaagatcacattttagataaaataagtacttggacaaggaattttatggagcaaaaactcttggacaagcacatccctgataggtcaaagaaggagatggaatttgctatgaggaaattttatggcacatttgatcgagtggaaactagacgttacatcgagtcatacaaaatggacagttttaagatcttaaaagcggcttacagatgggagggatactcaaccgtcggattccgttcagagagggttagaattttctttttggcactttacaaaatggtagaggaaattgcggcaaaggcggaaactaagcaaggtcgatgtgtcaaagatcaccttattaacttgtggattgatatgttgaagtgtatgctggtggaattggacctttggaaaattaaatcaactaccccaagcatagaggagtacttgtctgttgcatgtgtaactattggtgttccatgttttgttctcacatcactatatcttcttggaccaaaactgtccaaggatgtcatagaaagttctgaggtcagtgccttatgcaattgtacagctgctgtggcccgattgattaatgatatacacagttacaagagagaacaagcagaaagttcaacaaatatggtatcaatattaataacacaaagtcagggaactatctctgaagaagaggctataagacagataaaggaaatgatggaaagtaagagaagagagttgctagggatggttctacaaaataaagaaagccaattgccacaagtgtgcaaggatcttttttggacgacaatcaacgcagcttattctatacatacacatggcgatgggtatcgcttcccagaggaattcaagaaccatatcaacgatgtaatttacaaaccactcaatcaatattccccataa

SEQ ID NO: 6 - DNA, 2394 bp, Nicotiana tabacum
atgatacttggctacggaagcattatcatactaccattttctcatcataaattgggaaatggcaaattatgttcatcaactgaaaatacaatttgccagagaccatgtagaggagtaagatgcagctacagtattgcttcatcactggatggtttcgatgaggcaaaggagagaataaagaaatcatttcagaaagtagagctatctccttcttcctatgacacagcatgggtagctatgatcccttcaataaattctgtaaatcagccatgttttccacagtgcttggattggattcttgaaaatcaaagagaagatggatcttgggggctaaatcctagccattcattgcttgtcaaggactccctttcttcaactttagcatgtttgcttgccctccgcaaatggggagttggagataaccaagtccaaggaggccttgtctttattgaaaagcatggttgggcagttgataacaaggatctgatttcacctgttggatttgagattatatttcccagtatgatcaaatacgcagaaaaaatgaacttaaatctgcctttggatcctgacattgtcaatctggcgattcgcaaccgagatttagcaattgaaagggcgttacagaatgatttcaaggggaatattgcaaattttgaatatatggctgaaggacttagtgaattatgtcaatggaaggaaataatggtacatcaaagagacaatggatcattatttgattcaccagccactactgcagctgccttgatttaccatcaacacgatgaaaaatgctttgaatacttgaatacaatcttgaaactacacaaaaattgggttcccactatctacccaacgaagatacattcattgctttgcttggttgatacccttcaaagtctgggagtagatcggcattttaaaacagaaatagaaaatgttctagatgaaatttacaggctttggcaacaaaagaacgaagaaattttttcaaacgttgcccattgtgccttggcgtttcggcttttacggatgagtaactatgaagtctccccagaagaactagttgaatttgttgatgaagtacatttcttttcaacaagtgggaaatttacgagtcattttgaaattcttgagctccacaaagcttcacaattggctattcatgggaaagatcacattttggacaaaattagtaattggacaggatcttttatggagcaaaaactcctaacctatgactacattgataggatgtcaaaaaatgaggcggagtttgctttgaggaagttttacgccacatatggtcgagtggaaaatcgacgatataacgaggcatatgaggtgaacaattttaaaatcttaaaagctgcttacaggtctcccactattaacagcatagatttactaaggttctcaaagcaggattttaatttgtgccaagcccaacatcaagaagaacttcaacaactcaagagatggttcgaggactgcggactagaacaagtgggattgccacaacagaatttatacactaatttcttcctgactgctgctttactctacgaaccggaattttctgacgctcgtcttgcatgtgtaaagaacaccatgcttctaactttagtggatgattttttcgatggatatgttggcaaagatgaattgctcaacatctttgaattagtagaaaggtgggacggtaattactcaacagtgcaattccattcagagaggataaaaattttcttttcagcactttacaaaacgatagaggagcttgcggcaaaagcaaatattaagcaaggtcaatgcatcaaagaacactttataaacttgtggcttgatttgttaaagaatatgctggtagaatttgagtggtggagaaatcagacaacaccaagcatagaagagtatttgtctgtggcctgtgaaactattggtgttagatgcattactctcataacacaatgtcttcttgggccaaaactatccaatgatgttttacagagttctgaaatgagtgccttgtgcaattgtaccagtatggtggcacgactccttaatgatgtgggatcttacaagagagaagaagcagagagttcaccaacaaatatagtctcgatattaataaatcagagtgaaggaaaaatctctgaagaagaagctataaaacatgcaaaggaaatgctggaaaataagagaagagagttgctagggatggttctaattcaaagaaaaggaagccaattgccacaagtgtgcaaggatattttttggaagacatgcaaatcgtcttatttcgcatattcagatggcgatgagtttcgatttccagaggaaatattgaagaatcgtatcaatgaactactttttaaaccactcaagtcgtag

SEQ ID NO: 7 - DNA, 1248 bp, Nicotiana sp.
atgttatttgcaaggggttggtctcagatttcgagacgcagtatcaatagatgtcgatggctacgttcccagcaacaacaatttcaccattccaatcactttccctctcccatcgatgcttctcataaggttttgggttgcagagtaattcattcatgggtttctaatgctcttagtggtattggtcaacaaattcatcatcaaagcactgctgtagcagaggagcaagtggacccattttcccttgttgctgatgaattatcccttctgacaaacaggctgagatcaatggtagttgccgaggtcccaaagctggcttcagctgctgagtatttctttaaaatgggagtagaagggaagaggtttcgacccacagttctgctgttgatggcaacggcactgaacgcaccggtacttagaccccaggtggatgttgattctttgtccagggatttgcgtaccaggcagcagtgtatagctgaaatcaccgagatgatccatgttgccagcctactccatgatgatgtactagatgatgctgacacacgacgtgggataggttctttaaactttgtgatgggaaataagttagctgtactagctggagactttctgctttcccgagcgtgtgtggcacttgcctctttgaagaatacagaggttgtatcccttctggcaactgttgtggaacatcttgttactggagagataatgcaaatgacgacttcttcagatgagcgttgtagcatggagtattacatgcagaaaacatattacaagactgcgtcattaatttcaaacagttgcaaagcaatagcgctacttgctgggcatactgctgaagtctccatgttggcttttgactatgggaaaaatttgggcttggcatttcaattaatagacgatgttcttgatttcacaggcacatctgccaccctcggcaagggttcattgtctgatattcgtcatgggattgtaactgccccaatattgtacgccatggaggaatttcctcaactgcgaacggtggtggaccgaggatttgatgatcccgtcaatgtggagattgctctggactaccttggtaagagccgagggatacagagaacaagagaacttgcaagaaaacatgctaaccttgcctcagcagctgttgacgctcttcctgagagcgatgacgaggatgttcagagatcaagacgggcacttgtggaacttactcaaagagtcatcacaagaacaaaatag

SEQ ID NO: 8 - DNA, 1842 bp, Nicotiana sp.
atggacgtggcaatatctaccaacgtatggatgctgcacatggccacctccaaaatacctccgccaccagcagctacttgtttaatttcctctttcagccgagaaaagccgtcacttgtatcaaaagccagctgcctctctaccgcagctgcaggccgcagcatgaaaactgaaccatcacctaatcagtactctgctatttcatcttcagatcaaaatctctctagacgttcagggaattaccaacctaccatgtgggattttgagtatattcagtccatacacaatgattatgcgggaaagaagtatatgaatcgttttaacaaactgaaggaggaaatgaagaagatgataatggccgagggatcacaagagttagagaagttggagctgattgataatttacaaaggcttggagttagttaccacttcaagcatgaaattatgcaaattttgagcagcataaagcagcacagtactccagcagattcattatacgccacagctctgaaatttagactcttgagagaacatggatttcatatctctcaagatatactgaacgatttcaaggatgagcagggtaacctcaagcagagtctctgtaaagatacaaaaggattgttacaattatatgaagcttcatttctctctaccgaaactgaaagaacttttctagagtctgcaatatcacatctacagaattatttgaacaatcatttatatggtgaagacaatgtaacagtctcattagtcagccatgccctggaacttcctttgtattggatgatgttgagagttgagacaagttggtaccttaacattaatgagaatatttcaaatgctaatcctcttctgctcgagctggccaagttggacttcaacattgttcaagcaacacatcaagaagatttgagaatcctatcaagatggtggaagagcacacaccttgcagaaaagttgccattttcaagggatagactggtggaggctttgttttttgcagttgggataatatttgagcctcaacacagctactgccgaagaatgttgacaaaggtcattgcttttgttgcagtcattgatgatatttatgatgtttatggcacacctgatgagttggaagttttcactaatgctattgaaagatgggaggtaaaggcaatggagcagcttccagattatatgaaagtatgttaccttgcacttttcaatattaccaatgaaatggcgtatgagattctcaaagagcaagggatcaacgtcctaccctaccttacaaaatcttgggcagatttgtgcaaatcttacctacaagaagcaaggtggtactacaatggatatacaccaactctggaagaatacatggataatgcatggatctcagttgcagttcctatggttttagtccatgcattcccccttgttaccaatccagttacgaaagatgcatttgaatccttaagcaaatatcctgacataattcgctggtctgctacaattttccgtttcgccgatgatttgggaacatcatcggaggaattgagaagaggtgacgttcccaagtcaattcagtgttacatgaacgaaaaaggtgctaccgaagaagaggcaagagaacacataagtatttgtataaaggagaaatggaaactcctgataaacacagctcaaagggagaactcattattttctgaaacattcattggatgtgcaataaatattgcaagaacgggacagagtatttaccagcatggagacgggcatggaattcaaaattttgagattaaaaatcgcatttccaaattattttttgagcccatcagaatttcaattccataa

SEQ ID NO: 9 - DNA, 1638 bp, Nicotiana sp.
atggatcttaggaggtcaggaaactacaaacctagcatttgggaagatggatatgtccaatcacgagctacattttacgctgaagagaaacattttgaacgagctgccggactaaaagaagaggtgaggagaatgctagggaaaacgatcgacccatttgaacaacttgagcttgttgacattttgcaaagacttggtttgtcctatcactttgaggaagaaattgatagagttttgaagcaaatgtacgttaatatttatactactaatagaaatgatgggcagaagagtgaagatttgtatgctacagctttagaatttcgactcctcagacgagagggctatcatgtccctcaagagatgttttgcactttcatgaataaggaagggaagttcaaaacaagccttgttgtggatactaaaggactgttgagtttgtatgaagcttgctatctttctatggaaggtgaaagcattttggaaatagctcgagatttcgccactaattatctcacggaaagccttaagaagaagatagatgagaatcttactgagcaagtaagccatgctttagaaatgcctctgcattggaggatgcagaggctagaagcaagatggtttatagaagtttatcacaaaagagagaacatgaatcctcttctacttgaacttgcaaagttggactacaacatggtacaagctacatacttagaggaactaaaagaaatgtcaaggtgggataagaacattaaacttgtcaaaaagatgagctttgttagggacagattggtggagggctttttatgggctgttggtttcactcctaatcctcagttcggatactgccgaaagttttcaacaaagatgtctgtactcctcacagcaattgatgacatctatgatgtttatggcaccatggatgaacttgagcttttcactgatattgttgacagatgggacatcaatgcaatagagcgactacctgactacatgaaaatctgcttcctagctctcttcaactccatgaatgaactggcttatgatattctcaaagaacaaggcttcagcataatttcacatataaggaagcagtgggctaacctatgtaaagcctacttactggaagtgaagtggtaccagagtagatacacaccaagcttgaatgagttcctgagaaatgcatggataacaaacactggtcctgtactaataatgcatgcttatttttgcatcacaaaccccataaaggaggaggaactggaatgcttaaagaattatcctgctattattcaatcgccttcactaattcttcgtcttgcaaatgacttggcaacttcacctgatgaaatcaagaaaggggattatctgaaatcaatacactgctacatgcatgagtcagggaggtctgaagaaaatgctcgaaactatataaagaaattaattgatcagacctggaagaagatgaacaaagatatactaaggggcagctctttctcaaaggattttagaactgctgcaatgaatcttgctaggattgctcaatgcatgtaccagcatggagatggatttggaattccagatcgtgagacaaaggatcggatctgctccttgttctttgagcccattcctctgtcatga

SEQ ID NO: 10 - DNA, 1383 bp, Nicotiana sp.
atgcttcatatgattggtggagaaccgcaccatgtccttagagatttagccaaaaaatatggaccacttatgcaccttcagttaggtgaaatttctgcagttgtggttacttctagggacatggcaaaagaagtgctaaaaactcatgacgtcgtttttgcatctaggcctaaaattgtagccatggacattatctgttataaccagtccgacattgcctttagcccttatggcgaccactggagacaaatgcgtaaaatttgtgtcatggaacttctcaatgcaaagaatgttcggtctttcagctccatcagacgtgatgaagtcgttcgtctcattgactctatccggtcagattcttcttcaggtgagctagttaattttacgcagaggatcatttggtttgcaagctccatgacgtgtagatcagcatttgggcaagtactcaaggggcaagacatatttgccaaaaagatcagagaagtaataggattagcagaaggctttgatgtggtagacatcttccctacatacaagtttcttcatgttctcagtgggatgaagcgtaaacttttgaatgcccaccttaaggtagacgccattgttgaggatgtcatcaacgagcacaagaaaaatcttgcagctggcaagagtaatggcgcattaggaggcgaagatctaattgatgtcctactgagacttatgaatgacacaagtcttcaatttcccatcaccaacgacaatatcaaagctgttattgttgacatgtttgctgccggaacagaaacttcatcaacaacaactgtatgggctatggctgaaatgatgaagaatccaagtgtattcaccaaagctcaagcagaagtgcgagaagcctttagggacaaagtatcttttgatgaaaatgatgtggaggagctgaaatacttaaagttagtcattaaagaaactttgagacttcatccaccgtctccacttttggtcccaagagaatgcagggaagatacggatataaacggctacactattcctgcaaagaccaaagttatggttaatgtttgggcattgggaagagatccaaaatattgggatgacgcggaaagctttaagccagagagatttgagcaatgctctgtggatttttttggtaataattttgagtttcttccctttggcggtggacggagaatttgtcctggaatgtcatttggtttagctaatctttacttgccattggctcaattactctatcactttgactggaaactcccaaccggaatcatgccaagagacttagacttgaccgaattatcgggaataactattgctagaaagggtgacctttacttaaatgccactccttatcaaccttctcgagagtaa

SEQ ID NO: 11 - DNA, 1530 bp, Nicotiana sp.
atggaggcaaaacacttatcattcatcttcatttcagtcttgatattcgtttccttcatcattcgtttatttcagatatggaaggcatcaaaaacctttaacaaactattgcctccagggccatggagtctacctttgattgggaacttgcacctattaatgaatggccgccttccagtacatcatactttcagaagtctatcgcgaagatatgggccaatctttcacttacgtcttggagaaatatcgatcattgttgtatcttcacctgagatggcaaaagaaattatgaaaactcaagaccttcgctttgctactaggcctgaatttatgtctggagacattattttctacaactacacagacattataacttgtccatatggtgatcactggagaaatatgcgcaaagtgtgcatcgtggaacttcttagtgcaaagatggtcaagtcatttaattcaattcgacaagcagagatgtcaagtctcatttcatccattaactccatgcctgatgactcattgatcaacttatcagataaaatgttttggtttacaagttctgtaacttgtaggtcagctttcgggaaagtgattcatgatcaacataagttgataatgttggtgaaggacatagcatcattagctgcaggatttgacttggctgatatgttcccttcccgaaagtggcttcacaagattactggattgaagtccaaaatgttgaaggttcacacaaaggtagatgcaattttggagaatatcattaatgagcatcgggaaagtcgaactaacggtaagaagggcaatggtgagactggaggtgaagatttgatcgatgttctacttcgagtcatggagagtggcgaattgggaactccactcacaaagaagaatatcaaaggtgttatttttgacatgttcttagcaggagctgaaacctcatctacaacaattatttgggcgttggctgaaatgataagaaatccaagtgttatggctaaagcacaacttgaagttagagaagtcctaaaaggaaagagaacatttgaggatattgatctagaagagttgaagtatctaaacctagtgattaaagaaacattaaggttgcaccctcctgttcctctattactccctagggaatgcagagaagaaacaaaaattgacaaatatacaatacctatcaaaactagagttctggtgaatgtatgggcaatgggaagagagtctaaatattggcataatccagaaagttttatacctgagagatttgagaataattctattgatttcaaaggaaaccactttgaatttattccgtttggtgcaggacgaagaatatgtccaggattattattcggtttagttaatgtaggacatcctttagctcaattgctttatcactacgactggaagactcctcctgggataactccagacaatttagatatgaccgaaacaattggggtagctggcggaagaaaggatgatctttgtttaattgttactccttttggtctctcttaa

SEQ ID NO: 12 - DNA, 621 bp, Nicotiana sp.
atgcaggacatgttcttagcaggagctgaaacctcagctacaacaattatttgggctatggctgaaatgataagaaatccaagtgttatggctaaagcacaacttgaagttagagaagtcctaaaaggaaagagaacatttgaggatattgatctagaagagttgaagtatctaaacctagtgattaaagaaacattaaggttgcaccctcctgttcctctattaatcccaagggaatgcagagaagaaacaaaaattgacaaatatataatacccatcaaaactagagttctggtgaatgtatgggcaattggaagagaatctacaaattggcataatccggaaagttttatacctgagagatttgagaataattctattgatttcagaggaaaccactttgaatttattccgtttggtgcaggaagaagaatgtgtccgggactgttatttggtttagttaatgtcggacatcctttagctcaactgctttatcacttcgactggaagactcctcatggaattgctccagacaatttaaatatgaccgaaacaattggggtagctggcggaagaaaggatgatctttgtttaattgctactccttttggtctctcttaa

SEQ ID NO: 13 - DNA, 786 bp, Nicotiana sp.
atgcaaaagcttgaaggcaaagttgccacagtgacgggtggtgccagcggcattggggaagcagcagcacgcctttttgcccatcacggcgcgcgcgtcgtcatcgccgacatccaagatgaaaagggcagagctttggcggaatccatccctttccagaggtgcagctacgtgcactgcgacgtcagtgatgaaactcaagtgaaagccatggtggattggacggtccagaaatatggtcaactcgacatcatgttcagtaacgcaggagtcgttggtaactcaggtcaaaaggtaatcgatcttgatctttcggaattcgaccgtgtgttaagagtcaacgcacgaggcatggcggcgtgtgtgaagcacgcggcacgtgccatggtggagcagcgcgttagagggagcattatttgtacagccagtattgcggcaagcagggcaggaccatggcgtacggattatgtaatgtcgaaacacgctgttttaggactagtgaaatcagcttcaaggcaattaggtgaatatggaataagggtgaatagtgtttcgccatctgcagtaatgacgccaattatgttgagtgcggagcaggagacatcattgaaggttttgaaaatgtatgggaacttgacttgtttgaagggaattacgctaacggtgaagcacttggcggatgcagttctgtttctagcttcagatgattctgcatttgtgagtgggcatgacttggtgctggatggtggcttgctctctcttccatctccaaatagttcattgtga

SEQ ID NO: 14 - DNA, 786 bp, Nicotiana sp.
atgatggcctctctcttcctcagattccacttggccagtgcaggtgataagagcattaggaatggggaagaatttggagttatgccctcaaatttacttcagaagattactcctgcaattgggattgcgttgcccgattatcttagttgcttaggaatgcctggtataactgcgtgggtgggcatagaaaagataggaaatgctaaagcgggatcgaatgtgtacatatcggctgcagcgggaggagttggaattatagctggacaactagccaaagtaaaagggtgtcgagttgttggaagtgttggttcagatgataaggtgaagctgttgaaagaagaatgtggctacgacgatgcttttaattaccgtgtagagacagattatgatgctgcattaaccaaatatttcccaaatgggattgatgtttattttgacaatgttggtggtaaaatgcttgaggctgttcttaatcatgtcaaccacggagctcgtattgcactttgtgggatgatatccgagtacaacaaggtttggacagaaagagaaggggttcggaacctattgaacatggtgggtaaagaagttatgatgaaagggtttatggtaggttcatattataaccactttgaggaattcataaaagagatggaagtttacttgaaagagggcaaaataaaatccaaacacaaaatctacaatggtattgagagttttttggagagtttagcatctctattttctagctctaatgtcggtaaagtaattcttcaagtaactccttaa

SEQ ID NO: 15 - DNA, 966 bp, Nicotiana tabacum
atggcagaaaaaatcaccagccacgagaacacaaggtatgcagtggtgacagggggaaataaaggaataggatatgaaacatgcaggcaactagcaaaggaaggaatagtggtagtgttgacagcaagggatgaaaggagaggaattgaagctctcgaaaagctcaaggaagagtactcaagcaataaaactgatgatgatcagattttatttcatcaacttgatgttatggatccagctagtatttcttctcttgtggacttcatcaaaactaaatttggaaagctcgatattctggttaacaacgcagggattggtggattaatggtagaaggagatgttgttataataaaagatttaatagaaggagacttcgtaaccatttctgctgaaaatggggaagaggatggtattaagaaatcaattgaaggtattgagcgtattgttacagattatgagttgacaaaacaatgcctggagacaaacttctatggtgcaaaaagaatgattgaagcatttattcccctccttcagctctctaactccccaagaattgttaatgtcgcttctttcttggggaagttaaagctattgtgcaaccaatgggctataggaatgctaagtgatgctaaaagcctgagagaagaaagggtggatgaagtgttgaatgaatttataaaagattttaaagagaaatcaatagaagccaaaggatggccaacttatttctcagcttacaaagtctcgaaagcatccctgattgcttacacaagggttttagctacgaaatatccaaattttcggataaattctgtgtgtcctggattttgcaaaacagacgtgaactgcaatactgggagcttaactgctgaagaaggtgctgaaagcttggtgaagcttgctttggtgccaaatgatggaccctctggtctcttcttttatagaaaggaggtcacctctttttga

SEQ ID NO: 16 - DNA, 1485 bp, Nicotiana tabacum
atgtcggtctttgcggttatttcattctttctacttctgttttttcttttcaaatcatatttgccctcatcgaaaacaaagaaaaattctccaccatctccttcaaagcttccgttaatcggtcacttccacaaactaggcttacaacctcaccgttctctacaaaaactatcaaatgaacatggtcccatgatgatgcttcaattcggtagcgtacctgtgcttatcgcttcatcagctgaagctgcttccgaaatcatgaaaacccaagatttgtcttttgcaaacaaacccatttcaaccattcctagcaagcttttcttcggcccaaaggacgttgccttcaccccatatggggattactggaggaatgccagaagcatttgcatgcttcagcttttgaacaacaaaagagtccagtcttttcgaaagataagggaagaagagacttctcttcttctccagaggattagggaatcgccaaattcagaagtcgatttaacggagctgttcgtttccatgactaacgacatagtttgcagggtggccttaggaaggaagtattgtgatggggaagaagggaggaaattcaagtctttgctgttagagtttgtggaattgttgggagtttttaacattggagattacatgccgtggcttgcatggatgaatcgtttcaatggtttgaatgccaaagtggataaagtggcgaaagagtttgatgcatttttggaggatgtgattgaggaacacggaggaaataagaaatcagacactgaagctgaaggggcagacttcgtggatatattattgcaggttcacaaagaaaacaaggctggttttcaagtcgaaatggatgcaatcaaagctattatcatggatatgtttgctgcgggaacagatacaacttccacgcttctagagtggacaatgaacgagctcttaagaaatccaaaaacattgaataagttgagagatgaggtgagacaagtgactcaagggaagacagaggtaacagaggatgacttagagaaaatgccgtatttaagagcagcagttaaggagagttccaggctacactctccagtgccacttctacctcgagaagcaattaaggatgcaaaggttttgggctacgatatagctgcagggactcaagtcctcgtttgtccatgggcaatctcaagagatccaaacctttgggaaaatccagaggagtttcaacctgaaagattcttggatacttccatagattacaaaggcttacatttcgagttaattccattcggtgcaggtcggaggggttgccctggcatcacatttgctaagtttgtgaatgagctagcattggcaagattaatgttccattttgatttctcgctaccaaaaggagttaagcatgaggatttggacgtggaggaagctgctggaattactgttagaaggaagttcccccttttagccgtcgccactccatgctcgtga

SEQ ID NO: 17 - DNA, 1797 bp, Nicotiana sp.
atgagtcaatcaatttctccattaatctgttctcactttgcgaaatttcagtcgaatatttggagatgcaatacttctcaactcagagttatacactcatcatatgcctcttttggagggagaagaaaagagagagtaagaagaatgaatcgagcaatggatctttcttcaagctctcgtcatttggcagattttccctcaacaatttggggtgaccattttctctcctacaattctgaaataacagaaattactacccaagagaaaaatgaacatgaaatgctaaaagaaatagttcggaaaatgttggtagaaactccagataatagtacacaaaaactagtcttgattgacacaattcaaagattgggattagcatatcatttcaatgatgagattgaaaactccattcaaaacatctttaatttgtctcaaaatagtgaagatgacgatgaacacaacctttatgttgctgctcttcgttttcgacttgcgaggcaacaaggatattacatgtcttcagatgtgttcaagcaattcactaaccatgacggaaaattcaaggaaaatcatactaatgatgttcaaggattattgagtttgtatgaagcagcacatatgagagtgcacgacgaggaaattctagaagaagctcttatctttaccacgactcatctcgagtccgtgatcccgaatttgagcaactcgcttaaggtacaagttactgaagccttaagccatcctattcgcaaagctataccaagggtgggagcaaggaaatacatacacatatatgaaaacattggaacacataatgatttacttttgaaatttgcaaagttggacttcaacatgttacaaaagcttcatcgaaaagagcttaacgagctaacaagctggtggaaagatttggatcgtgcaaacaaatttccatatgcaaaggacagattagtagaagcttacttttggacggtgggaatatattttgaacctcaatatagtcgttcaagaagtttggtaacaaaagtagtcaaaatgaactccattattgatgacacttatgatgcttatgcaacttttgatgagcttgtgcttttcacggatgcgatccaaagatgggacgaaggtgccatggatttattaccgacatatctgagacctatttatcaaggccttctcgacgttttcaatgaaatggaagaagtattggccaaagaaggtaaagcagatcacatctactatgcgaaaaaagagatgaaaaaggtggcggaagtctattttaaggaagctgaatggttgaatgctaactacattccaaaatgcgaggagtatatgaaaaatggacttgtaagctctaccggtccgatgtatggaataatttctttggttgttatggaggaaattataacaaaagaggcttttgaatggttgacaaatgaacctttgattcttcgagctgcatcaacaatttgtagattaatggatgatatggctgatcatgaagttgaacaacaaagaggacatgttgcttcatttgttgagtgctacatgaaagaatatggagtttcaaagcaagaagcatatgttgagatgcggaaaaaaatcacaaatgcgtggaaagatataaataaggaactcttgcgccctactgcagtaccaatgtttatcctcgaacgatctttaaatttttcaagattggccgatacatttttgaaagatgatgatggatacacaaatcccaaatccaaagttaaagacttgattgcttcgttgtttgtcgaatctgtcgacatatga

SEQ ID NO: 18 - DNA, 717 bp, Nicotiana sp.
atgtcttgtcaatattacttaaccacgacgacctcttctctcagaatattctccttcaccccccgccgttacgcaccgaattcttctgcaagtcaacctcatgagttctttaaaaaacaagtacttttcagttccaatctgcaatgcaatgcggtttcaagacctcgcgcacaagttatcaagcgggacgacaacgtggaagaagtagacagtgcagaagaacaacaagaagaagaagaaacacaagaggtgtacagatcaaataagataaagcaacatatttatgccgtccggttaatgttgcaaagtatggatgatggagagataagtatatcagcttatgacacagcttgggttgctcttgtgaaagacattaatggaagcgatactcctcaattcccttcaagtcttgaatggattgccaacaatcaacttgctgaatgttcgtggggtgacaagtccatctttttggctcacgatcgaatcatcaacacattggcctgtgttattgctttgaaatcttggaatttgcacattgacaaaagagaactaggaatgtcgtttatcagagagaatttaagcaagattggagatgaaaatgctgtgcatatgccaataggatttgaagtggcgtttccttcactaattgagattggaaaaaagataggcattgatattccggatgattctcatgtcttgagagagatatatacctga

SEQ ID NO: 19 - DNA, 1821 bp, Nicotiana sp.
atggcgtctatcaccataaaccattcattttcccgtaaccctaacatctcattccatccccaaaatcctctcattcaaacccaagctctcttcaatttcaaaccatcaatctccaaatgttcccctattatccactgcgcaatccgccgtcgacccgaatataccccgagccacattcccgacccgaactacattcgcatcttcgacaccactctccgcgacggcgaacaatccccaggcgccacaatgaccacaaaagaaaaactcgacgttgcgcgtcagttagctaagcttggtgttgacataattgaagccggttttcctgcttcttctgaagctgatctcgaagctgtgaaattaatagcgaaggaagttggaaatggtgtgaatgaagagggacatgttccggtaatttgtggacttgcgaggtgtaataagagggatattgataaggcttgggaggctgtgaagtatgcgaaaaaaccgaggattcatacgtttattgcgactagtgagatacatatgaagtttaagttgaagatgagtagagatgaagttgtggagaaagctaggagtatggttgcttatgctaggagtattggttgtgaggatgttgaatttagcccagaagatgctggaagatccgatccagagttcctctatcatatccttggagaggtcatcaaagctggggcaacaacccttaacatccctgatactgttggatacactgttcccagcgaatttggaaaattgattgctgatataaaggccaataccccaggaattggagatgtgatcatctcaacacactgccagaacgatcttgggctttctactgccaacaccttagctggagcatgcgcaggtgcaagacaagtagaagtgaccatcaacggaatcggtgaaagagctggaaatgcttctttggaggaggttgtaatggccttaaaatgtcgtggagagcaagtactaggtggcctgtatacaggaattaatacacaacatatactcatgtcaagcaagatggtagaggagtacaccgggcttcatgtgcagccacacaaggccattgttggagctaatgcgtttgctcatgaaagtggcatccatcaggatggaatgttaaaacacaaagatacatatgagattatatctcctgaagatattgggcttaaccgagttaatgaatctggcatcgtccttgggaaactcagtgggcgtcatgctttgcaagccaaaatgctcgagcttggatacgatattgagggaaaagaacttgaggacctcttttggcgattcaaatctgtggccgagaagaaaaagaaaattacagatgatgacctgatagcattaatgtcagatgaagttttccagcctcaatttgtttggcaacttgaaaatgtacaggttacatgtggaagtcttggcctttctacggcaactgttaagctcattgacgctgatggtcaagagcatgtttcttgttctgttggaacggggccagttgatgcggcttataaggcagttgatctcattgtaaaggtacctgtagcactccttgaatattccttgaatgcagtcacggaaggtatagatgccatagcttcaaccagagttttaattcgtggggagaatggccatacatcaacccatgctttaactggagagactgtacaccgttcttttagtggaaccggagcagatatggatattgttatctccagtgtccgagcctatattggtgcattgaataagatgttgagtttcagaaagctggtatcgaaacacagcaaacctgaaggcagtgcagtcgtatag

SEQ ID NO: 20 - DNA, 1479 bp, Nicotiana sp.
atggcgattttgatatcaagatcaagaaactttaaccattttcttctaagcacaaggtttcgtttcttatcactcctaaaccaaacaagttcagaaacatttttccgccatgccaaaacttcatcatttacaactgcagccggcggtggttttacaaagtcgacggcggcattttccggcgagtctgccgccgttttccggttagaacgtttccagtccaataaagctggagagcaactaaatacactctactatgaagaagatgaaaatcaccaaattagttatgaaaatcaggtgatggatttccctggaggacagcttccaattactcctcaaatgaaatttattgcagagtcttctgaaaagaggttaccttgttatagagtccttgatgatgatggctatccaattccaggcagcatttttgaggaggtgagcaaagaactggcagttaagatgtatagttcaatggtggcacttcaagttatggataccattttttatgaagcacaaaggcaggggaggttatccttctatctcactactgctggagaagaaggtatcaacatagcatctgctgctgctctcaccctggatgacttcgtcttgcctcagtacagggaagtaggtgttatcgtatggcggggcttccccctgaaagagattgccaatcaattgttcggaaacaagtttgattatgcaaaaggaaggcaaatgccatgccaccatggttctaacgagctcaattacttaactatttcttcgccaatagcgacacagattcctcaggccgctggcgttgcttactctctgaaaatggataaaaaggaggcttgtgctgttacttatcttggagatggtagcactagtgagggtgattttcatgctgctttaaactttgcagcggttttggacgctcctgttgtatttatatgccgcaacaatggatgggccattagcactcctgtaaacgaacaatttcgaagtgatggagtcgcctcaaaggggcaagcctatggaattagaagccttcgtgtagatggcaatgatgtcttggcaacttatagtgctattcgtgcagctcgcgaaatggcaattaaggaacaaaagccaatattagtagaggccatgacttatagagtagcccaccattcaacatctgatgattcaaccaagtatcgacccgtcgaagaaatagagcactggaaaacagcaaaaagcccaatatacagattcagaaaatggattcagagaaatggttggtggaatgatgaaaatgaatctgaacttcgcagagacgccagaaaacaggtattgcaagcaatgcaagcagcagagaaggtggagaaacctccattgacagatttgtttacggatgtttatgacaaagtgccattaaatcttcaagagcaacagaagtttacaagagatgctgtaaagagatctccaaaagaatatccttctgatgttcctgtttaa

SEQ ID NO: 21 - DNA, 1479 bp, Nicotiana sp.
atggcgattttgatatcaagatcaagaaactttaaccattttcttctaagcacaaggtttcgtttcttatcacgcctaaaccaaacaagttcaaaaacattttcccaccatgccaaaacttcatcatttacaactgcagccggcggtggttttacaaagccgacggcgacattttccggcgagtctgccgccgttttccgggtagaacgtttccagtccaataaaactggagagcaactaaatacactctactatgaagaagataaccatcaccaaattattgatgaaaatcaggtcatggattttcctggagggcagcttccaattactcctcaaatgaaatttattgcagagtcatctgaaaagaggttaccttgttatagagtccttgatgatgatggctatccaattccaggcagcatttttgaggaggtgagcaaagaattggctgtaaaaatgtatagttcaatggtgacacttcaagttatggataccatattttatgaagcacaaaggcaggggaggttatctttctatctcactactgctggagaagaaggtatcaacatagcatctgctgctgctctctccgtcgatgacttcgtcttgcctcagtatagggaagtaggggttatcttatggcggggcttccccctgaaagatattgccaatcaattgttcggaaacaagtttgattatggaaaaggaaggcaaatgccatgccaccatggttctaatgagctcaattacttaactatttcttcgccaatagcgacacagattcctcaggccgcgggcgttgcttactctctgaaaatggataaaaaggaggcttgtgctattacttatcttggagatggtagcaccagtgagggtgattttcatgctgctttaaactttgcagcggttttggacgctcctgttgtctttatatgccgcaacaatggatgggccattagcactcctgtaaacgaacaatttcgaagtgatggagttgcctcaaagggtcaagcctatggaattagaagcattcgtgtagatggcaatgatgtcttggcaactcatagtgctattcgtgcagctcgcgaaatggcaattaaggaacaaaagccaatattagtagaggccatgacttatagagtagcccaccattcaacatctgatgattcaaccaagtatcgacccgtcgaagaaatagagcactggaaaacagcaaaaagtccaatatccagattcagaaaatggattcagagaaatggttggtggaatgatgaaaatgaatctgaacttcgcggagacaccagaaaacaggtattgcaagtaatgcaagcagcagagaaggtggagaaacctccattgacagatttgtttacggatgtttatgacaaagtgccattaaatcttcaagagcaacacaagtttattagggatgctgtaaagaaatctccaagagagtatccttctgatgttcctatataa

SEQ ID NO: 22 - DNA, 1098 bp, Nicotiana sp.; identical to SEQ ID NO: 1

SEQ ID NO: 23 - DNA, 1101 bp, Nicotiana sp.; identical to SEQ ID NO: 2

SEQ ID NO: 24 - DNA, 19774 bp, Nicotiana tabacum
atgcaagtcataattacatcaagtcacaggcttttctgccatcttcatcaacttaagagtcctacatcattgtctgcacaacaagcggagtttaaaaaacatggacccggtaagttactttttctatgcaggatttaacttatatctactaacactgcaaagaaatggagtttacactaacttggatcccttacgcgaattatcccttcattctaagttatgtgaacctatttgattaggcacatcggtaaagaaataaaggaggacttttaaaatttgtggtcgtaaacaagccataatatttatatgactataatcttttgaaacttgtggtgttaaatatgttagagtatttatgtagctacaaaagtttctcactgagggaataattggaaggttaagttttatgaaattccaatttaaaaagaagtcattcttttttgaatggaccaaaaaagaaataagttcatagtacaaaatttcatatgatggattggaacttagatgtaaacatatttcccactgttatggaatggttgatttcttttagtaatagaatttcagaacatgttgagtcgaaattgttctctgtcctgtacttttgtctttcattcggcccgcttgtgagaagaaactcaatctccaacagtttagtttttaattaattttaatcagaaaattgtcttgttttgcacttttcgtctttgagttagtaataaagtacgcaaatggtattatgatgaagatatcacgcttcacctaggttattcattcaaaatttcaaatttaattttagcttgaacaattactgagaagtagcatctgtccgataatttttcaacctaaaagttttatttttgaaaataaacaaaaacaatgtccagcactaatttattaacctgcatttgctcataatgactagcttaccttattgtctcttatgctatagatcaccaattattaatatatcacagcaaacctccttttgaatttaatggtcagcggatcatgcatgggccagacctaattatctcccaaagatttttcttactctggttcaacttttggggcctcctgattgtctttatgtataggctttaaccaaaacgcactttcgatggttgaatcttgaactcgcctttatatgattactaacatttccctcctatttcgatgaggaattttctgaagaaaaacttcaaaatgaaccccctttcaagttcaacatttgtacgtcattataaagctggcagaccttactctttcaactatccaaatttaaaattcaaatatattttgtatatcaaaggcacttagccaataaagtacaaaaatatctgaattttaatatttaaactctgagtttcacttcgtacagaaaatgtagctgattttttatcataacaattcaactcaccaagctgtttgaattttagagccattataaacatatgaattttagagctatataatattatatagattagcgtcagtggcgaagtcaagatttttactaaggggtgttgcttatagtggaaaatataatagttcgtcgcaggcaagaacaaacctgtgtcacggggagtcaacagtgaaaaaaatttggacaagaatagctccgctcctgagcgggagatacaagcccagttttataaataaactgggctaaagtgttgtatgtatgtgggtgacagttgtcgtatgcgggtactacgaggcccacgactgtcatttacttaccccttgttatctcaatagtagtgtaactaattaattactatgccgtttcatttttatttgatatatttacaggaaattggttgttccaaactgaaggctcacttctatataaaccacttcgtctcaattgtgcacctagcgatgcaagttatctcggtatgatcatttcaactgtgcaagatatataatacattaaacaattgcctaaggaattgttcacaaccacaaagcaagttttgataaatcagctacacgcactttttgcaggtaatgtgattgagtacttagaatctaatcgctcaaacaactccgaagaaaaggatattcaggtgataaagaaaattttgccttagcatgacttctcttaaattggtgacagaagtgttattttacggggcaaatatatttttgaaaaatattttcggatgttgtgattggtgggtgaaaataatttatctatactatattaaaagcacgaagccccttagcgaaatatcgttcgcctttttaattacccttttaaaatatgtttcgtattggacaaaattgtaatttaaattacaatcctaatttttaggactttaaaatcaactacaattttgtttatttagcttttccttattgaactaggtagaaaatcctaatatttagcctttaaaatcaataagagtttttccttatataaattttcttatataaacgttagaaactgctattatttagctaagttatacaagtcaaaaacacaatgcttttaataacacaaaagatccaaagcttacatgtgatttgtttattaaaaatagaattcttattacataaagttataattactgttgaatatcttaaggagttgaattaacaaaaagactacgttacttctttaatattgagagcaaataattaaatctttgaattaattaattagcaaaagaattcaattcattttttttcaaatttatcatataagtaaaattatttaacaagttgaaaaactcttaagatacataaacttattttttataagaagtgcactagcggtgaaagaaataaaaactaaagcagaatcgattatagtgataaaaatataaatttgaagaaataaggataaaatagtagaagacaaaatatattataaatgagttgtcagtttattttgctttttttcttgtgttcagtaaaaatggacaatggttgtatacttttttatattatgttattcatattaaaatatttattcaacataaatcatttattaaaaatttacattgtcgttaccaatcgtgtaggatatatacgccaacctttttcattctcaaattcataatagactaaaagattcatttttttttaagttttgttatttgacaaatctataaaaattatgataaaggtatttttatgttttgtgtttagtattaggtcagattaataacaataattttcataagatatttcaccatcaatcttcataaatcacaataagacattgtgaatttttatgcgctaagattcttcgttttttttggtcaaaagtatcttcattttttgagataggtacatggaaaaaattatcatttcaggatttttttaacttttattttatataatttaaacaaatataatacttacatgttatttttaaaattatgtatttaatgatatggatacacgcgcaaagcgcatattctaaactagtatttaaaaaagatatatttggataaaaaggctagtacatttcttttaaaaaaaaaaacaatacgacattttaaaatgaaatcatagcataattgtttgtctgaataggtaaacagaaaaatacagatcaaaagtttgacagaagagatcaaacatatgttgaattcgatggaggatggaaggtcaagtgtcttagcctatgaaacagcttgggtttcctttattccgaatactactaataatcagagacctatgtttccatcttgtcttgaatggattatagacaatcaactttgtgatggttcatggggagaggagattgtattatgcatatatgatcgactcttgaacacactagcatgcgttgttgcattgacattatggaacacatgccttcataagagaaacaaaggtgaacttaaaacttatatttcttcatcttcgtgcaaatatgttactctctccgttataatttatatttatgtgaacctatattactaggcatgaagtttaaaaaaaaaagacttttgaaacatgtagtcctaaacaagtcataatagttgtgtgaatataattcttttgaaacctatcatcttaaacgtatcaaatttgtgtgtttgtgtggctctaaaagccttttattaagggtatagtggaaagttcaagttaaattattttcaaatttgaaaaggattcattatttttggaacggactaaaagaaataaattcaaataaactagaacagaaggagtactatatattactcagtatttaacatgatttttacgttattctcgtcgaatttaagttatatgcatacactttctcctaacacatttacacaatcaaatcgctcaggtatttatagggaaattttcgtgataagcattaatttgtcggcaactttataaaaatagtaatggattgaatagcctaaataacattctaattacttacaccaaaccaaatagtttattctagtaaaatatcgagtacttataaaattttactagtttcgtaagctccttagcttttagtatctaaccaatacttgcatgcttacaatgggccattcttgtttcctaggagtgatctttatcaaagaaaacttaatgaagctagagacggaggaagttgaacatatgacttgtggatttgaacttgtgtttcctgctctccttgagaaagcgaaacaattaggcattgacattccgtatgatgctccagtgttaaaggatatttatgtaaggagagaagtaaagtttacaaggtaaattcactactcctttttcatcttagcgttatcctaataacttcaattggcacgaacgtggatccaagattttaatttaccggtccaatctataagatttcagcatcatagtcattgtacttttttcttatggattcagaatgtaatatttattgaaattacggtaaaggtccaaatatgcccttgtgctatatgaaattgaacacaactacccttcgttaatactttagcccatatatgcccttaccatcacatagttggtccatttatgccctagcagtcacatagttggttcatatatgtccttttcgaaacggaatccacccaaactaattagctctttctttaattgtactaaagtacattacaaacactatttcctttttatttgtactttttttcctttaccgttctcttttctttcttcttttttcttttcttctcttttttttcctttttctttctcccatatccgatttcctccattggtgatgccttctccattttcgttaccaattttacgtgattttattcctaaaaatcaaacctacaccaccaaaatcttcatagcgagaaggctctggttcttctgaaaagaaggagatgaaaattgttggagaaatttcgatggtgttaatttggtgaaggtgggatatggttattcaaattttgaaggtgttgttcactgtggagcttcaaatctgaagggaacatgacctttaaaatccgaataaccatatcctaccttcacccaattaacaccaccgaaaacatttctccgacaattttcatctcctttatgtcagaagaacttgtggggtttgtgatattaaaattagcaggaattcatgagttttgtcaagtgaaattggtgaagaaaatggagaaggcatcagcaatagaggaactcgaatatgggagaaagaaaaagaaaaaaaaagagaagaaaaacaacaaaagaaaagagaaaggtaaagaaaaaaggtactaataaaaaggaaataatatttgtaatacactttagtataattaacgaaagagctaattagtttggatggattccctttcaaaaagggcatatattgaccaactatgtgagggtaagggcatacatgagctaaagtattaacgaagggcaaatgtgctcaatttcgtatagtacaaaggcatatttggaccttttccgttgaaattatagtgatttttcacaaatatatctatattccgtaaaaaaaaatttattagatttaattgttgaacccattggtcagaggatccttccttccgtgaataatatacatttttgttttgtagaattcctaaagatgttatccatacgattccgacaacagtgttgttttcattagaaggattaagggacgacttggactggcaaaggcttttgaagcttcaaatgcctgatggttcattcttaacatcccctgcttccactgcctttgcattcatggaaacaaatgatgaaacgtgtttggcatatcttcaaaacgttgttcaaaagtgtaatggaggaggtacctagaatattcctttgtccaataatgttacataacatgaacaatttcgaaaaattgtactacttctgtttcaatttatgtaaaagcatttcattttatgtctaattacaagcttttaagcaacacaaataacgtttaagcaatacaaatagaatgataagaccacaagttttaaataacgtttacatccttacatgcaatatgtttagcgcgacaatacccactcgacatagtaacgcgactttgggcgattgatcgattacaacgccttggaatctcttattattttgcggaagagttcaaggaacttttggatcatgtgttcaggtaaacaaggagcaatataattcttctccatttgcttcacactattaagagtatgaaattatcaattttgagcaatttatgtgacaagtcttatttattgttgaactacagatactgggacgaggagaatggaattttctgtggaaggaattcaaacttttttgatgttgatgatacatgcatggctataaggttgctaaggttacatgggtatgatgttagtccaggcaagtcaatggaaaatgagttcctcagtgatttcgcaatactataagtcgcaataatgaaccattcaaaatatctaaaaagcatatgaaaaaatcacggtcacaaaaaaactcgtttgactctcaaaattcgaactctgccaaatacaatagcatttactggtggcttaatctatttttttattatctgtcacagaagcgctaaacaattttaaagatggtgatcaattcttttgccaaagaggtgaagtggacgggtcaccatcacatatgtttaatctctatagatgttcccaagtattattcccaggagaaaagatacttgaagaggcaaagaatttcacttacaacttcttacagcaatgtctagcaaacaatcaatgcttagacaaatgggtcatagccaaggacatccccggggaggtaaataatgagcaaagattttaagttctacatgtaatcatccatagaaaatgcgattagcaacatggaaaatatgggaaattaactacctgttagaataccttacaacacactaatagtaaaattctttacgcatgcagtacatataagttaaatccatgagaaataaactactcattttgaagaactgcaatatgcgatactctttatgttttaccttgcatattttaccaaaaatcttgtaaaacattcatttatagataaggtatgcacttgaatttccatggtatgctagcttgcctcgggtggaagctaggctttatatagaacagtatggtggtgcagatgatatttggattggcaaaacgttattcaggtaacacttttattttctagtcaataaactgttctatgttagttttcatttgattttactatacataagtagttacacaaataagagagtatttaacttggtaaaactacaaaattatagtctaaccaactcttgtctcttggtacttcaaacaaataaatgttatcataattgcctcaggaagacttaaattgatgtgtgtgattatctcatctaaatttcaatttggtaaagaccacaattttatttgcttaatttgtctaattagttctgtatactcacctcaccagcggaaatgatttttcttctggccaagcatgtgaaaagttttcttcaataacaggtgtcggtgaaattcaaatttaggatctttgcatgttataatgctatgtttatgtcacgaccctaaactcggacccgatcgtgatggcgtctctcatgaagacaaggccatccgatacttttccatttcaattttaagaaattaaacaataagtgttaagtcttaaacacgataaaatcccaaatgataagtagtgaacattacagtttgcggaaataaaactcaacatagtctggtaccggggtgtcaccagtcatgagaatctatcaatttaatacaagtctgaagtgtctacaaagctattatagaatcgctgaaagagaatgaaatgagataaaggggggaagcactgggctgcggacaccgagcagctacctcgtgaactccgaaatctgtcgggagctctcaactctcgcaagcaggatctgcaatgcctgaatctgcacacggagtgcagggagtaatgtgagtactccaactcagtgagtaataatcataaataaagactgagaaatatgaaatcacgtaagcacataacaagctataaggaagtagtaaaagccagcaaaatagtgaaacaatacagatgtgtaaaatcactaagttcagtttaaacttcataaaatgtctttttaacaagttaagcaagtaagtgacaggcaattaggaaagataaacacataaaggatcgcccctcgggcatagtgacaacaaatccgcctctcgggcaatatctcagaaacaataccagccctttcgggctatatatcacatcacaatgggtacccgcgattactgggggtgtgcagacttctggaggggccccttacagcccaagcgcaatatcaagccatctcgtggcatcatcactaggctctcagcctcatatcaacaagctacctcgcggcgtacaaatctcatgccctcggcctcaaaatcataatccggtgtttcctcacaacataggccctcggccttacttagtcaaaaatcctcacaagccactcggataatagtaaaacatgattctcagcccaaagtatcatttaatagattatttaagtgttaaaacagagtaaacatggttgagttatgaaaaatagtagaatataacatgactgagttcaagtataaagtcaaaatagtgagaaaatatcaataaaaatcccctaaggattcaaatagttggcacgaggtccaaatatgggattacgcccaaaacatgatgatagcaaatagatttcagtcaaatacgcggtaaaatagtcatttgggacggactaagtcacaatccccaacagtgcatgaccccacactcgtcatcaagcatgtgcgtcacctcaatatagaaaacgttgtgtaattcggggtttcatacctttaggacatcatttactatcattactcacctcgatccggtccaaactctagcctgcaaggcctttgccctcacaaatcgacctccggatgctccaaatctagccacaatcagtatataatcattaaaatatgctaagggaataaagcccactcgagaatatccaatttccatcaaaaatctcaaaattgctaaaatccggcccccgggcccacatctcggattccaataaaatttacatcaataggttccttatcttcccacgagttcatacatatcaaaagtaccaaaatccaaccacaaacgaccccttaaatcccaaatcctaggtctccaattacaagccctagttcttcaatgctatgcttaaattccatgattaattaggtagaattcacacaagaatcgagcattgagttcaaaaatcttacctccaagtgttatctcttgaattcctcttcaaatcctctcacaaatctccaaaattacccaaaaatggtgaaagttagccctaaaatcgtggacaatggttttttaaacattatgtccaggcatcaaaaacctttttcgcgaacgcggtcaaagcctcgcgttcgcgaagcacaaactcaagtttaccaatgcttccttcatcgcgatcgcgactatcactaagcgaacgcgaaagattgactttatcactcactacgaacgcgacaccacatcctcgaacgcgaagaacaaacaccctggaccctgctgctcactttccttctatgcgaacgcggcatgaacctcgcgaacgcgatacacaacaccccagccctttgcgaacgcggagccttcatcacgaacgcgaaggctaattcctcaacctcactcgctaacccttcgcgaacgcggacctactcgtgaacgcgaaggtcaattttcctgcaacctttcaacagtttttttgcaacttttcaaaacatgaaatggcccgattgactacccgaaactcacctgaggccctcaggacctcaaccaaacatgccaacatatctcataacatcattcaaacttgttctaaccttcgaagcactcaaaacaatatcaaaataccaaatttgcatcgaattcaagcctaaaaattccaaaatcttctaaattacgcttttgataaaaaacacaaccaaaccacgtccgaatgccctgaaattttgcacacacatttaaaatgacacaacggaactgctgcaacttctgaaattccaatccgacccttatttcaaaatcttacttaccaaccggaaaagtcaaaatctcaatttcgccaattcaagcctaaaccttccacggacctccaaaatgcattccgatcatgctcctaagtcccaaatcacctaacggagctaaccaaatcataaaatttccaatccaagatcatagacaaacaagtcaaaacttgatcaaacctttcaaatttcaagcttcatactaagaattgttcttccaaattccttctgattaccctgaaaaccaaaaccaacgatttacataagtcataatacatcacacggggatatttatgcccgagaactggcgagcgaagtgcaaaagcaaaatgaccggtcgggtcgttatagtttaactgtgtgatcataccataaaaaattcatgtgattagacataacacactcaaatttatttaatgacgccttgagggccaatatttatctaattggcttcagtgccaatatatatatatatatatttaaaattatgggatcatgttactatttgtcgcaattttagtagatttctatgcaaaatttatatttacatcgaaagtgttgaatggcagaaatcccacatcattgaagtaccaattttggttggtacttcaccctataaaaggaggcctaatgtttaggatttaaacacacctctcatttgctttcttatcttcttaaggcatttgtatcttctctctttagtattatttcacttgtatttttgaagtggaataaaatattggttgtgtccgaggagtaggcaaaatagccgaacctcgtaaattctggtgttccttttattgttgctttattgtcttatttattatttggtggctgtcataatttttggtatagtagttgtgacttattcacactatatacatttggcttccgcataaattggtatcagaaccaaggtactttctaagtatgctctgtggttgcagcatagtctgatcttccacatcagaaaagagttatcttgataattgagtcaaggttcagtctgagtatgctctgtggttgcagcttagtctgatcttccacactagaaaggaaataatcttgatttttgtcgtcaactattaaataatatttgtgtcaaatatgagagacaataaacaagaagaatctacatcaagtgtcaacaatacgtcatcattggcatcttcgcttatgacaagaattgtgtcaaatgcgaaatttgcggtagaaatttttgacggatcaggatattttgggatgtggcaaggcgaggttctagatgtcctttttcaacacgggctagatcttgtcattgaagacaaaagaccaaatgttattggagaagaagattggagaattatcaaccgtgttgcttgcggtaccattcgatcctaccttggtagagagcagaaatatccatacacaaaggaagcttctgcaagtaaattatggaaaacactggaggataaatttttgaagaaaaacaatcaaaataaattgtacatgaagaagagactgtttcacttcacctatgttcctggtaccacgatgaatgaacatatcaccagtttcaataagttggtcacagatttgcaaaatatggatacaacttatgatgatggtgacttggccttgatgttgttggcgtcacttcctgatgagtacgagtaccttgaaactactctactccatggaaatgacgaagtttctctcagagaagtttgttcggctttgtacatctatgaacaaagaaagcgagaaaaacagaagggcggagaaggagaaatactatttgtaaggggtcgtcctcaaaattaaacgagaataaagaagggaagatccaagtcaagatccagacccagcaaagatgaatgtgccttttgtcgagaaaaggggcactggaagaaagactgtccgaagttgaagaataaggccaaacataacaatggaaaggccattatggattcaaatgtagctgattgtgatgattcagacttctcattagttacaacagagccatcaatatcatcagacgtatggttgatggactcggcttgtagctatcatatgtgtcccaatagggactggttcgtggaatttcaagaaggaaaatatggagtcatccacacagcggacaacagccctcttacctcatatagaattggttcaatacgattaaggaaccatgatggaatgatcagaacattaacagatgttcgatatgtaccggatttgaagaagaatctcatctctgtaggagcactagaatcaaaagggttcaaattcattgcagaaaatggagtgatgagagtatgctctggtgcactagtggtaatgaaggccaatcggaagaacaataacatgtaccgttatcgcggtagtacaattattgggacagcgatagtaacatccagtgacgacaaagaggcagaagcaaccaagctatggcatatgcgcttgggacatgctggaggaaaatccttgaaaactctatcagatcaaggattgttaaaaggagtaaagactttcaacttggagttttgtgagcattgtgtcaaagggaaacagacaagggttaaattttgtacagcgatccataatactagaggcattttggattatgtacactctgatgtttggggtccttccaaaacaccttcattgggtgggaagcacaattttgtaacctttgttgatgatttttaccgaagagtgtgggtgtatacaatgaaaagcaaagatgaagtgctgggaatttttctcaaatggaagacgatggtggagaatcaaacaggcatgaggatcaagtgtattcgcacagacaatgaaggtgaatacaaaaatgatcatttcaataaggtctgtgaaaataatggcatcgtccgacacttcactgttagacatgcaccacaacagaatggagtggcagaacgtatgaaccggaccttgctggagaaggtacggtgtatattgtccaatgctggcttgggcaaataattttgggctgaggcaattacatatgcatgccacctcgttaatcatctatcatctgctgctattgatggcaagacaccatttgaaaaatggtatggaaagcctgctgtagattatgactctttgcacgtgtttggctcaactgcatattatcatgtgacagagttaaaattggatccaagggcaaagaaggctatttttatgggaattacttctggagtcaaaggatatcgcttatggtgtcctatgacaaagaaagtaatatacagcagggatgttacctttgatgaatctgctatggtaaataaggtaacaaaagataccaaacaaaatgaaggtgcttctaagcaggtggagtttgagggaaatttttttttcctacacaagaagcagaggaggagacaaatgaagattatcctctggaaggagagccagtagaggagattccaactcaggaacctcaacaacaacttgaatcaatagcaactagtaggccaaaaaggacaataacgaaacctgttcgtatcatagagatggttgcttgtgcaacctcaattgtagctgatgatgttcctaccacttataaagatgcagtccaaagtttagaagaagataagtggaggattgccatgaatgatgaaatacagtcccttcatcagaatcatacatggagattggccaatctcccaaagggaaagaaagcaattaggtgcaaatgagtatttgcaaagaaggaaagatttcctaaccaagtagatattcgctacaaagcaagattggtggccaaaggatatgctcaaaaggagggaactgattacaataaagtattttctctagttgtaaaacattcctccattagaattatgttggctttggtagcacaattagatttggaactagttcagatggatgtaaaaactgctttttacatggaaacttggaggaggaaatctacatgactcagccagaaggattcaaagttgctggaaacgaaaatatggtgtgcaaacttgaaaaatcgttgtacggattgaaacaatcttctaaacaatgatacaagcgatttgacgagtttatgttgcgacaagggtacaagagaagcaaatacgatcattgtgtgtatttgcgcaagcttaaagatggttcctttgtatatcttctcctatatgttgatagcttccaagaattcagaagaaattgataagttgaagattcaactgaataaggagttcgagatgaaggatctgggtgaggcaaagaaaattcttggcatggagataataagatatagacgttcaaagaaactctgtttatctcagaaagaatatttgaaaagaatactacaacgttttggcatagatgaaaagactaagccagttagtactccacttgctccccattttaagctaagtaatactatgtcgtcaaaggatgaagctgaacgagagtatatgtcaaaggtaccatacgcaaatgttgttggtagcttgatgtatgcaatggtctgtacgagacctgacatttcacaagctgttggagttattagcagatatatgcataatccaggaaaggagcattggcaagctgtgaagtggattctacggtatattcataatactgtagatgttgggttcgtttttgagcaggaatgcaatcagtctgtaattggatattgtgactcagattttgcgggtgatctggacaaacgaagatcaactactggttatgtgtttacttttgcaaaggcaccagttagttggaagtctactttgtagtcaacagttgctttgtctacaacagaggcagagtacatggctattacagaggctgtgaaggaggcaatttggcttcaagggttgctaaaggagcttggtgttgaacaaaaaaaatcacaattttttgtgatagtcaaagtgctattcaattagcgaagaaccaagtttatcatgcaaggacgaaacacattgatgttcggtatcattttgtatgagaaatcatagaagaaggtggagtcacagtgaagaaaattcatactacagagaatcctgctgatatgctaacaaaagtggtaactgcggtcaagtttcaacattggttggatttgatcaacattgttgaacactgaagattgaagatgaagacacaactaaaattttgttattgagagaaaattgaagatatgaaattttgccaaggtggagatttgttgaatggcagaaattccacatcggtgaagtaccaattttggttggtacttcaccctataaaaggaggcctaatatttaggatttaaacacacctctcatttgctttcttatcttcttaaggcatttgtatcttctctctttagtattatttcacttgtatttttgaagtggaataaaatattggttgtgtccgaggagtaggcaaaattagccgaaccttgtaaattctggtgttccttttattgttgctttattgtcttatttattatttggtggctatcataatttttggtatagtagttgtgacttattcacactatatacatttggcttccgcaacagaaagatctgcccctgccacacacaaactgttaggattgaaaaatcaggtgtcatgcggaagctagcaaagcaaaccttcaacgacgataaatccaacaacaaaagagaaatataccaaaagagacacaaacatttcacgtgatttggtcaactgacctaagtccacaaatggagataagcaatccactatataaaagagagtataaaatatcgagagaacaacctcacgaagagacaaacacaagtgatacactaacactacacgactctcaaatcccatatggctacattgtggatgctactgaatgagaaggatgaatcttcaattaagagaactccaaagcttttcctacaagaaaagatactagctaaatatgagagatttgtaattttcttctacatgaagaaaaatccaattaaggtaaacatgttgccctttacttcaacaaatagaaaaatcaaatatgatgagaaattatggcaaacctctaacacaaacggctagcattaaggttttaggagcaatcctaagttacacataataaagtcgaaaacgcccaaagtatgtggttgcctaattggaaatttgttaatcttttgcccatgcagaatgcccgatatcagcaacaatgtttatttacaagctgcaaaattggattacaatagatgccaaagtcaacatcgatttgaatggctgattatgcaacagtatgcgcttgaaactttcttatatagttgtactaaactttataaacaatcaaaatatttagcttttttatcttctttattaatttgcgttcataacatgaataggtggtttgaaaagtgcaacttccaacaatttggaataagcaaaaagtacctcttagtttcttatttcttagctgctgcaagtatatttgaagtcgagaagtcaagagaacgacttgcatgggctaaatctcgtataatatgtaagatgactacatcttactacaatgaaaaagccacaacttggaccactgggaattcattgttgatggaattcaaggattatccgagcagaaataatgggtaagtatatataaaatgattagcttatgtatgaagatattcctatatctctcgcaacaattagttggaaacaaatttataaaatatacatggcaagttgcacacattctcatttctcacaacaaatatttaattggtacttcggtttttatatttacagaagttatttcgctttttttgccccctctgttgcagtaatgaaacaaaagagatcatagttctcaacaatcttcatcagtttttgcaccaactctcggaagagacttttgaagaccaaggcaaagacatccatcaccaactacaaaaagcagtgagtatacaaggattccttcttattctaacaatcagtggcatgtacagaaaattttgtaagcgatgtcaccatttgaaaaagtaaacgaatgaataaattattataacaataagtggtgtaatttttataattttacctaatatttttatttttcttattatctaccatatatattaagtaaaaactttgatgaagcggtgtcacgcaaggtgcgtacacccctagcaacaatattgctagctagtaattagattcatcattcactatatcttttgaattatcaaaataagtcaaacagacaaaaataaatttggattgagttatgtattcaattgaatcgattattttcagcttgagttatgtatacatgggcaagaaattaaagaatctatgtatacaaaataagaccatatattcgttctgaactcataaactctaaattttagatccacctatgcaaatagaactacaaccttaagactgactaatgatgctactcttcaaattcttcatattatttttgcttgcttgttttcttttgagtgtagtgggaaacgtggttgatgtctttgagggaagaaaaggatacatgccaagaagaagcagagttgttagtgcgcacaattaacctttctggcggccatatgacacatgatgatatactattcgatgcggactacaagaatctgtccaatcttaccaataaagtttgtcacatgcttaatgagatccaaaatgaaaaggttagaaaccatcatagtcatctcttaattttctttcgaagtaattaccctaacaatcaattatttttcagtttgttctattaagtcataaaatcatttttataatttaaaaaaaatcatgtgtgtatttggtatgatatgttttgtttcataatgttttgaaaagtattttacctaggaaaacaagtttcttaaaaataaagaaaatgatttccctggtgcgagtagagaaaacaagttacatatgtagctctcaatgctgattggcccccacccccacccccactcccacccccaacactacaaccctctccggacccatccctgcaacaatccagactttagatggagttccacatcggtaaaacacaagagagatgctgggtttataagttaacaagccttagaccctagtgatgcgttttaaacccgtgagggactaggcccagaggggacaatatcactagcggacgctgaatccataagagggggtgtatgcaacaccccagactttagacagagtctcacattggcaaaacacaagagagatgctgagtatataagttaacaagccttagaccctagtgacgcattttaaagtcataagggcttagacccagaacggacaatatcactagcgggctgaaatgttacaaccccccgcctccaccctcgacccttccccctacgcttgggatgccatatcccctccacgccaccccaccacctcgctttaggtctatagtgtttgcctagattatacgcaaatacatgtgaacaattttttttgtttagttaccaaacatcagaaaataaataagaaaaccacttatttttcgagaaatttattttaggatttttttggtggagtacattttccttcataccaatcataacctttcaatgtatcactaaaaataaaaataaaaatgtcagaaaaattatgttaaattcaatcccgtaaacataagaaactcaccttacataatatctataaaatacaacgctttaaaaaacagaaaataaaacattttctaacccatttaaaaagtcgtgatgtgtctcatggtggaagacaacgggtttttggttggatttcaaaatgatttttataaatattagacggggcgatattgatattaaaaggtgtgctgaagtggcagcctacttattttttatggaaccagatttagtattttcttgtatttttttagtttttgtgatacataagaacgatttagttattttttcatttaaataattttatgattttggcacattaaatctgtgaaattgaacaattcttttttatttctattctaattcctctatttaaatctaaaaaaatgctaggtgactggaagctcaaagaccaccaatattgaattcgacatgcaagctcttgtaaagttagtatttggcaacatctcaaacaacatcaaccaagatattaagcaaatcttttttacagttgttaagactttctattacactgcacacgttagtgaggaaataatcaactttcacatatccaaggtactttttcagcaagtccagtaa

SEQ ID NO: 25 - DNA, 9552 bp, Nicotiana tabacum
atgatacttggactgagaagcaaaatcataccacttcctgatcataagttgggaaatatcaaattaggttcagtaaccagtaagacacataatttttattactatacgttacaagaagataagtatcattcaattcttttataactaatttcagtctcttttttgataaaatttctgtgtctccttgttcgaagaagatgcaatttgccacagaccatgtagagtaagatgcagccacagtactgcttcatcaatggtatgctatttctttttgcatacaaatttagccaactggagtaactgagacagaattttaaaaagtggcctagaaaaggccatttgtgtaaatgcccttaataaagcaatggtggttgcaggaagaggcaaaggagagaataagggaaacatttggaaaaatagagctatctccttcttcctatgacacagcatgggtagctatggtcccttcaagatattctatgaaccaaccatgttttcctcagtgcttagattggattcttgaaaatcaaagagaagatggatcttggggcctaaatcctagccatccattgcttgtaaaagactccctttcttccactctagcatctttgcttgcccttcgcaaatggagaattggagataaccaagtccaaagaggtaaatgacaccgagtttagaagaacgatttctttgaaatttgtggttgtaaatatgcaatgatatttttttggttataaaacaaaaaatttaaagttaaattttatccaaatatataaaggtgtcactcattttaaaactgacctgaagaaattacatcatttgaattaattttttctgtgtagtgtcagaatattaaaattttaattgtttacaaatcagttatatatcttagtgtagcttagctccaaaggttaaataatatatgaataaaagatatatcttgtaagctaattgatctcccattagcaagcgttcagggtggtcctttgtaacaggtcacagaccaacagtaagaagtttgcttgtctgtatcttgtttgaagcggttttgattttatgtctcccatctgtgtactaattaatttatttttactatataaggtaggagataatgccgaaccccatcatcatgggccagcatagcgcagggtgaatggcttcaattaaaaaaaattaaccttagtagagaaaaattaaagagaaaaacagaatgtgtgtatatcacttaaccatatggttaaataataatataatatatgaataaaagatgcatgcattcattagtttgtgtaaacactaagcagaataaaatgtttagttaccatcttgcatgttataattgtcaagtatctagacgatgtgcaaaaacaagtaatgctattgacatggttcaagaaagagtgagcaaaggagtttgcattttgtagtattattaattacttgaatagttccttcatttttcttttaggccttggctttattgaaacgcatggttgggcagtcgataacaaggatcagatttcacctttaggatttgaaattatatttccctgcatgatcaactatgcagagaaacttaatttggatctacctttggatcctaaccttgtaaatatgatgctctgcgaacgtgaattaacaattgaaaggtatgcttctttattaaatggtcattttacatattatggaaattattagttttgcagccttgcgcaaaaactcctaatgtataaaacaattataggggaagttcaacaatattagtcgtctgaagctaaatcttaataaaaggcctaagcgtaatctcattcgattcatatattaataagaaaaaggacatattttttatatctatagatcaataatcaaacatgacaaagagaaatatcaaaaaaactttgttgaaattggaaagataaatgactagaaataggaaaaacgaatggatatatgcatgaaaggaaatatcatagagggtaggagaggtaaatgtactactagtagttaataatcttttggaagaagtttacacatctactcatccgtccaaacagtaaaaagctaacataaattttgaaacaacttataagtgatagttatttcctttgtttcaatttatgcggcaacattttgtttttggtccattttataaaaaatagtgactttctaaatttgagaagattaaacttctcatttttattcttaatgagaaatttttatatatatcctcacaaatgtctatgatttttttatcataaatttcaaaagtatcctttatttcaaactccatagtaattcaaattttaccacataaagtctcccatggtggtatataataactgtaattttttgcctgtaattattgagaccaaaagtactaacttcatttgtcttgcctttaatcgatcacacgaacaattatacgacggtgtttgactaggtactgaacttaaggaagattgaatgacttttgccacatgtctaaagtgcgctagacttacacatgacatagcatttatttgattataaaagtatctcattaaggataaattaaaagtttacaaaaagttatcaaataaagaatgggattcttcttttgtgaaaagacattaaaaaaaacatgtcatataaaatggaacaaaggaatatagaatttgccctctccacgaatttgtatgcagatttgtaaattgacttataaaactcctaactttatggagtaagtctcttgggaaaatgtcattctgaagaatgataaagcaaaaaaaaatagtttaaaatttgtagagtgcaaaacttcatttttaatttaaacatgactgcaacactcaccccttccaaaaatagaaagaggtcattctttttttgtacagactaaaaagaaaataggttcacataaattgaaacgaaaggagtactagattttgatactctagcttcaactcatcaatttgttgggccattttttaaccaatagagccttaaagaatgaattcgaggggaatatggcaaatgtagaatattttgctgaagggctcggtgaattatgtcattggaaagagatgatgcttcgtcagagacacaacgggtcgctctttgattcaccagccactactgcagctgccttgatttaccatcagtacgatgagaaatgctttgggtacttgaactcaatcttgaaactgcacgataattggggtatgcactactaagatcatctcaatacttccccattatctgcctaaaggaaaatacttttcatatctcttcttagaattcgttggaattaagttttaattatgttagtatgtttactatatgttcgatatgtttgataggagactaatagttttagggtactagaaaatataaagtacttctactgataagaaatttatgttagtatgataatttagcgcttgtgacgcatggtgacatccttaccgcttctccccacaagtacaaatgtacatctacgaacaactcacatattgactcaaatcatgctttagagaaaatcacaagaagagtaagtctaataaacttacctctcaagtccaaactctgacatagtactacgatgaaccaatttatttaaaaagctcggacgtcatcaacaaagggatatctacatatatgtggaaaatggcagaattctgaccgccaaaacagtcggaattcacgaatttcctactactttccgaccaaaattggtcggtcgaaaaacagttggtcggaaaataattttcgatcaaatccgttagtgatttccgaccaaagtagtcggaacgttcgaaaggttagacgaccaaatattttcaaatttccgaccaaagtggtcggaatttaccgaccgaatcagtcgtaataatataaataaaataattatttatttaaaattaaataatataaatatataatttccgaccgaatcggtcggaaattaatatttaaaaaatataatttccgaccgaatcggtcggaaattaatatttaaaaaatatattttatttaatttccgacgaaatccgtcgaaaactttttaatttttttttaaaatttccgaccgcatcggtcgaaaatctgggaatttttggcaaaatgtgggcagctgtccgactgtttccgtcggaaatcagtcggaattttctgtaaaactgagcagcattctgcccaatttggagctacaccacgtgtcaaactattacaatataataacgccaacaaccaatcaaccattaacacaatctaaaccaacaataccaatcattaacataatctaaactaacaataccaactattaaaataatctaaaccaaccattaacacaacctaaactaacaataccaaccattaaacctaacaattttggacataaaaatatccaaatagtagcccacattcaagtttaaaaataaaacataaagttgtctctcacaatcaagtttaccaatcaaccaaaataccacacctaaactactacacatcagattcagtttgttcatcctcatcatcagatagatcatgcccatgttttctcatgaatttctggcagtggagggtcgtcgacggagctgcagcgaggcggcatcgccggtgagtggcattggtgatggcagcggcgggttgggtgggggggagaggggaggtttgagtgtgagagagagaagagagaaggaagaaaacagggaaagaaaaaagaaaggggtcaggggggttttaaaagaaaataggtcaaatagtcgaacctcgttttaataaaaaattccgaccgaattagtcgataacagttatgcggtatttttcgccaaaatttacgacggatatagacggaatatcagccgtaattattattaaaaattgaaaaatatatttttatgcaatttccgaccgatttcgtcagaaatttgcgactactttttccggtcggaatatttcggtcggaaattggccgttttttagtagtgatatatgagttcatatatcaataacgcttcataacaataccaactaagtaagtagcacttaggtccaacttcacatgactttcacaaaaattcttatttcaccatttgatatcaatccttgaattttaactccaattcatctattaaatgtgttatggaatctagccatttcattagaagttcaaaacgatatcgttcaaataagtccaacactattcatcttccctattaataaactttcagtgtcaaagctatgataggagggttcatctattccacccttctaactactttttcagctcataaataatattaaaacactcacttatacttcataaataaggttcatgtagtaaaaattatctttgtaagaaaatcctagaaaatctctcttttggtgtttttggttgatttaataaaatttagcaaactaaaggaagtttcaatgttaatactagaattaattaactttaatgagcacaaaacatcgataaaaacttgccttgtatgacccaaatgaacccttggtcaaaatcctctcgatcctaaatcatctaactaataatgagttgtacacctgagtatttaaagacactgtaaactaacttctaactaataactaactaacagctaattacaaagatcaataactaacactaatttatgaaccttctagaagtgtactcctttaaataatacactgtacaacctgtctaagctacatatttcagcattactaatataatctttttcgttattcttatagtccccactatttgccctacaaagatacattcaaatctcttcttagttgatgcccttcaaaatcttggagtagatcggtattttaaaacagaagtcaaaagagtactagatgaaatatacaggtaatttgaaatgatcttcatggtttatacaatttatctttttaaaacttttattaatattaatgctgaattatgaataggctttggctagaaaagaatgaagaaattttttcagacgttgctcattgtgccatggcgtttcgacttttacggatgaataactatgaagtttcctcaggtttgtaactaaaaactcagaaaattaaatttttacctatgcaccaataatataaggggtgtcttgtcgtaattggtaaagttgtttgtcgtaattggtaaagttgttggtcacaagttcaggccgtgcaaatagcctcttgcaaaaatgcagggtaaggctgcttagaatatacccttatggttcgacccttccccggacctcgcgcatagcgggagcttaatgcaccgggctgtccttttacttatgcaccaataaattgttactttctttctgcagaagaacttgaaggatttgtcgaccaagaacatttctttacaacatcaagtgggaaacttatgaatcacgttgcaattctcgaacttcaccgagcttcacaggtggctattcatgaaaggaaagatcacattttagataaaataagtacttggacaaggaattttatggagcaaaaactcttggacaagcacatccctgataggtcaaagaaggaggtatcacctgtatataaattaggccattcaaaaaacattctttgtaattttcaattttatgatattccattactagcgagtcaattaaatatcagatggaatttgctatgaggaaattttatggcacatttgatcgagtggaaactagacgttacatcgagtcatacaaaatggacagttttaagatcttaaaagcggcttacaggtataattctgacactattactataagattttagataatatgtaccgtcagcgggttacatttgccaattattgcaggtaatctatattgttttcaagattataaatctcacattttaaggaggcttacctgtaaatattatttgagtgacggttaaaaaaactttacattaatgatgtatgtaacgtaaactcttactaaaagtagtatatatgttttgtttattcttattattctcttctgcatttaaacgtgtggacaggggcagatttataggagagattatggggcacgcaaacccatgatctcctcaaaattagatattttatgtacatattttttaaaattggtataatattaactattggcatccatgcttctatttaatatatttttcctctttttattttagtaatacattcatgtactgaaaatcctagatccacatctgtatatgggcggatcagagttacggttgtagcaatgcccaccgccttcaacttaaacaacatatgtcagtgaacattggtatgctaacgcttaatatgggtagcaagaaaaaatacaagctactttaaataaaatgtaatggtacattttctatcgaagttggaagtccttaaaaattggtcatattattatgtggggtctctctctttctctcttttaggtcttccggtattaacaacatagacttgctaaagttctcagaacacgattttaacttgtgccaaacccgacacaaagaagaacttcaacagatgaaaaggtatctacactggttagcttgactagaccttgtcattcttaaacaacttcattttgttgataattatatatatatatatatatatatatatatatatgaatgtaggtggttcacagattgcaaactcgaacaagtaggattatcacaacagtacttatacactagttacttcataattgctgccatactctttgaacctgaatatgctgatgctcgtctagcatatgcaaagtacgccataataataacagcggtggatgatttcttcgattgttttatttgcaaagaagaactgcaaaacatcatcgaattagtagagaggtattgttatctcttttcttataatatatcaacaaaatcctttgacctatgttgttcaactcacattttttagaggcacttgagtttatgataaagaatgttacacttgtccctcatcaattttgtacgggcttttaaaagggttcaaatgatcctaggctacttcattcatagctttatggttttggatttatactaatattctttcacatggtatcagagccaaaactttctttttttcattcagaccattaagccactaacattgctatggcctaacttatcaattatcatgttgagcctaatctacttaactcttgaagatcacaatttgttgagactcttctctttctacgttaaaaataataaccaaaacagaaacaaaccgtagaaccgggctgtgttgcaagagagtattagagaatgttacacttgtcccttagatactccacccgattaccttgaaattttggattagatactcatactctttcacatattatgttaacactttcactatagatgggagggatactcaaccgtcggattccgttcagagagggttagaattttctttttggcactttacaaaatggtagaggaaattgcggcaaaggcggaaactaagcaaggtcgatgtgtcaaagatcaccttattaacttggtatgaagaagtacattaattattatatattctctaaatcaatttttttttcatgcttatatttctttcttttcgattgactagaaatatatcttgttatagtggattgatatgttgaagtgtatgctggtggaattggacctttggaaaattaaatcaactaccccaagcatagaggagtacttgtctgttgcatgtgtaactattggtgttccatgttttgttctcacatcactatatcttcttggaccaaaactgtccaaggatgtcatagaaagttctgaggtcagtgccttatgcaattgtacagctgctgtggcccgattgattaatgatatacacagttacaaggtaatattattttcttcgttagaagaatattttatcaaatgttggctattgatttttgacaatcttttttcaatatattgaactgagataaaattttacataaaatattcttttttcgaaacactaacttcttcaaatcaaattttattccaaaaattactaaaatttacatttgaaagtgagaagtgacacaaaaacaaagccttgtccggctagattgatatttgataaattaatataatataatgtgctgctggttcattttcttcttattaagctcgtctcactaagttttcgcgctagaaggatcagaccacgttgaatttattttgtacgcttttttttcaagtagacatacaagtgtataattataacattaatccttattatttcgtgtgttcttgcagagagaacaagcagaaagttcaacaaatatggtatcaatattaataacacaaagtcagggaactatctctgaagaagaggctataagacagataaaggaaatgatggaaagtaagagaagagagttgctagggatggttctacaaaataaagaaagccaattgccacaagtgtgcaaggatcttttttggacgacaatcaacgcagcttattctatacatacacatggcgatgggtatcgcttcccagaggaattcaagaaccatatcaacgatgtaatttacaaaccactcaatcaatattccccataa

SEQ ID NO: 26 - DNA, 9552 bp, Nicotiana tabacum; identical to SEQ ID NO: 25

SEQ ID NO: 27 - DNA, 15383 bp, Nicotiana tabacum
atgatacttggctacggaagcattatcatactaccattttctcatcataaattgggaaatggcaaattatgttcatcaactggtaagacacataattttgatcactacaagaatatattttgtaattcaattattgtgtaactatgtcctaatttgtgtgttttttttttattttttgtgtgtgtgtgttttcttacaaaagaaaatacaatttgccagagaccatgtagaggagtaagatgcagctacagtattgcttcatcactggtaatatcccttttctgttccatttttttttggggggtgttgattcaaaggaaatattatatactctctccattttagtttatccgaagttattttctttttcagtctgtgtaaaaaaaatgataagaactagtccatatccgctatgcaaattattttctttatcatatttggaaacaaattacttttatgcaataatttatagctatgcaaaatatatgtatctcttttggaaagctccatcgatctacaactattttatcaaccagtctagatctatgtgtaccaaggttgtgtttagataaaaaaatccgaacaagtttaggaggtcgtctatgtattcagcctaattgataggaactagtccatatccgctaactcagaggcgaacctacactataggttgaggagtcatcgggatccggaaatttcggcaaaaacttcatatatacttgctaatcttttcaaaaaatagtgatattagcatagacctccgtaccaatctatataaacagtaaaaaatttatattgaataacaagtgccccgcgaccacctaatcctgagtccgcctctatactaactattgcacaaaatgggtgtttggtcatgactttacttgcaaatatgcaaatatgttcaatctgaaataatggtgaaatgttaaaaaagaaattagtttgatgaatatttcacgtcaaataattgttttcacttgcaaaacttttgtctttttcgaagaacaaattcaatttccaaataattcttttcaattgtttttaactttatccagatattgtccaaagtcccacttatatattcctttctattcccttttcttctttcttatcatagatctttacacaaatagccgtaacttactttttctaactagtatacataaattatatactgattataaatgtttatacgcataatatatatttacggattattattaatttaagtgatttgttcggtaactatttaggataattcttcatcttattgttaaagaactagtccatctctcatttgtaggatggtttcgatgaggcaaaggagagaataaagaaatcatttcagaaagtagagctatctccttcttcctatgacacagcatgggtagctatgatcccttcaataaattctgtaaatcagccatgttttccacagtgcttggattggattcttgaaaatcaaagagaagatggatcttgggggctaaatcctagccattcattgcttgtcaaggactccctttcttcaactttagcatgtttgcttgccctccgcaaatggggagttggagataaccaagtccaaggaggtaaccttcttcaattaatttcttttgtgagaaagtaatgttgaaaaagaaaaggagtttacatggacggttttaaaaatatttacataatcaggtcacttattatagacgatcatatttagttttctttataaatgttaattaggttatctggtaaagctggtaaccttcatcgtgtctgtagtactatgtcattgttactgcttattattattgcttttctctctattttctagttcttatgttgctggtattatctttctggcctccgctgttgatactgatctactgtctcttttcatcaccttgagccgagggcctttcgaaaacagtctctctactccttcggtgcagtgataaggtctgcgtaaacattaccctctccacaccccacttatgaaatttcactgggttattattattgttgttgttagtggtggtggtggtaaagccggtaactgacttgctataagtgtaaaaaaatatttacacgctgtcgacgcatataacttaaatctaaaataatactatcaacacgattagataaatagaacgtgtggaggagtttgcatcttgtagtattctaatcacttgtggagttgcctcattttcttttcaggccttgtctttattgaaaagcatggttgggcagttgataacaaggatctgatttcacctgttggatttgagattatatttcccagtatgatcaaatacgcagaaaaaatgaacttaaatctgcctttggatcctgacattgtcaatctggcgattcgcaaccgagatttagcaattgaaaggtttgcttattaatttgtttaattatcaatttacatatacagggaatatatattaattttgtggccttgcgcatgtcccattccaaataaaacctctacatgcaatttggtctcttactattgtataccttatatattacctacaaagagaattatatttggatgctagatatatttttgaattcttccctaatgaaaattgtctaaaccaaatttgagttatctcattacaaaactaagaatcagattttattaattatttggctagtgcaagaaaaaaattactcgaagcaattaaggatggtctttttacattaagacaaagcaagagcatttattttggtcgataagattaagtaatttcattacttcaaaatagaaggagcatacaaggagggaggtgcaggtgcaccactggtagcataaggaaaaagacattctacatctatagtttcatccgtagatggatcattacaaaaaatagtggtttcagtatcttttttttttttgggtaattaactttcttttgtattaatcaccaaagaagagctgtacaaatccatagtcaggctaactcagctgactatctcaaggcgtaaaaaagacaaacaaagcatacctatttacagataaaactaatgaatctactatgttcctaggtaaaattgttgtatgtaactcttagctcgattagctactctaacatggcaaatatatgctatctcccgcagaagaacatcactgccttgatacttttgctcaaatatacgtgtgtttctttcgatccatattgcatgtgaaatctcagcatatatcattttgaagatgctagctttcttggacttcccttttccttgcttgataatccactgaaggtgctgatcctagcaagtggtagacatatgtgatctttgaacccaattcatgactttctcccacaattctttagtgtatgggcatttaacaaataggttctcccttgattcatcttgatcttgacacataacacattgaggagtaacagttaaaccctagctggctagtctatctttagttggcaatcgtccatgaagcaacaaccacatagtgaagactgcctttggtctagcagtattttggaagattagacattatcagctgactcttggtaagtctcctagaatttgtaggtatatttgtctaataatgctcttgctgctatcatttatattatgtgtctgcagtatagttgttctagaaccaattattcttctcaccatccaactggcttgctgtggcattggcatctgtggtagctgatgttgtttggtatagtatgtattgatccatcttatccataatttgtcctgtttgtgtgctaagtcccagcaagttttggcaattgctgctttgttccataaataaaggttgatgaggttaagtccaccagctgacttgggagtacatatcttttcccatgctactaaggacttcttggttattgtgttagttccagactagatgtaacttctatagagtgcctctatcattttcaataccttagcaggtaagataaacaattgagcccaatatgcttgaatgccaaagttacagattggaccagctgcacatgaccagcataaaagagctttttggcagtccaggaagaaatcttagttgtgatcttttcaatcaaaggttgccactgtatgagagttattttctttgtagacaaaggaatgcctaggtacttgaggggtaaggatccattttcaaatccaggtgagtcaatatttgttccttcacatcctgcttcaccccaccaaaataaactgaactttttcctagattagtctataagcctgatgcttgagagaactgagagaagcatttatatagagtggccactgagaataggttacctttagcaaataataggagatcatcagcaaaactcatatgagtaatgtctagcttcctacatctggggtgatattggaagctagactctttcttaagctcatgtagtgatctactcaagtactccattactatcgcaaaaaggaaaggagagataggatctccttgtcgaagacccttagcagcattgaaagcttctgtggtttctccattcacaaggatagtatagttgacggtcttaatgcattccattatccatctgataaacctgttaggaaatctaagctcctctatcacctgttgtaagaagatccattctactgagttataagctttttggagatcaatctttatcatacatctaggagatatctgggctctagtgtaagatttgactagctcatgagctaggatgacattgtcagcaatctttctaccagggatgaagccttcttgagcttcacaaataatgtaaggcatgactttctgcaatctggaagccaagattttagagatcatcttgtataagattgaacaacaagcgattggtctatattctttgactgtgtaggtttagtcactttagaatctaatgtaacagtggtgtagtttatggccttatagatctttccagttgagaaaaactcctttataacatctatgatctgagtgttgataatttcccattcttttttgaataaaactgcattaaagccatcaatacccggagctttatcatcaccaattgctttaaggctctcaacaatctcttgagtagttacttctgcacagagatcaaatctttgttgatgagatagtgtaggggaattcttcatgtacattctgttgatggaagataaggaagcggcagctgatcctattaggcttttataaaaatcaacaatctctcttttgatagcatcaggttcagtcaacttgtctccaagcaaatttgtaatttctatgatttgcttcttttgagttcgatccttcatcactactgtgaagtacttagagtttaaatctcctagttgtatccattttgctctagcattctgctgcatgacactcttatcaattaaagaccacttctcaaggttcagtagtgtttttttccatatccagtatagcatcagtgcacccttgtgagatttttccttggatgtctctcagttctattctagccttctcaattctttgagtgatgcccctgaattctttagagtttaaggctttcaaagcaagtttcaggtctttcaatcttgcccaagctgatttcaaagtaccatgtggactatgtgaactccacatgctagcaactatttgagaaaagtcctcatgttctgcccatatgttaaagaatctgaaaggcactttacctttccatgtggaggatgttagggttaacagcataggagcatgatctgaaatttgaggcaatccatagcttgtttccacatgaccctaggacatcatccattcataattgccaaatactctatccaatctactgctgaccatatctgcttcaggatgcttattagaccacgtatagtagtcacctttccaaggtagttctatcaatgtagtgtgttgaaggcaggcagcaaagtcttatatttctgagtagcttactggattacaagatagtctatcattagggtataatactgcagtaaaatccctagctatcatccatgatactgctatacttagtgagagttgttgcaagttatcccagagggctcttctttgttccaacccattgtgtccatacactaccgtgaatagcaatcaatatcacttcttctactttttacctaacaatgtatcatttgagcatcatctttaataccattaataatcaagttattggtatccaacaatatccaaatcctttcattccttgcatccttgtagttagtcagcatattccatccaggtgcaatagcttttacaatcctttgagcattcccttccttcactatagtttctataagtcctactagcttaattttatttcctctaatataatctctaacctacttttgtttataccttttattaacaccccttatgttccagaacaaccaattcatcatagttgcatggtatttccacctctatccgcaggtggtatgtgctcttcgtgcctacttgttgatacagcttcaaatctattcttcactgggatgggagtcagagctcgaaagttgatgaagttaagctcagggctttgcactgctttgcctctgtcatccggcttctccctcgcagctccaggaattatgttatgttgagcattagttcccttaggatcaggtagctttgttgttcctctttgatctataactttcactttattaccttctagctgttgttcatcagatggagtttgctttgcattctgaggtccagttgcaacatgtataggcctcttggttctccattcttgtgtgataaccttgttaccccttgttctcattgtctgattagactgctgcattataggttgtgcttgggtagtgcatttgtgtcccacaaccaaacatttgtcacaataagaaggtttccagtcataggttacggcctgcagaaacttctttccataaggatccataaccacaatttcagtgggcaattcttttgtaacattaacttcaataagcattcgagcataggatactcgagtttgtttagtagtacactcatcagcaaagacaggagtcccgattacactagcaattctgcttaaagagccaactccccagcacgacataggcaacttaggaaattttacccacaatggcataacattagggaattcctctgtgaaatcaaaatctggagtccatggttttagaatgatgggcttattagcaattgagtaagggccagcacataatatctctcacgcatctactgtagattgaaatttaatgatataatagccttcatcataatagaacaattcacgttcagtgacatgtgactaatgtaacttgatgtatcgcttcattgcattttaccttggtccatcacctatgatatatgctatcaatacgcatttccatattttctcttcctcctctacttctaattcatctaattgaaccataggttggccatcaacaatttgtggcagaatataggatagtgacataccattggtggcacatctattcttctgaaatagggttgtccatgaagctttaggtctagtagtcttatttgccatcgccgcctcttccactgttgatttctccgagttaccttgtatacttacttgattttgagcttgatttaccagatctattgttccattttctggtactggtggagaagttgctaattgaccaattgtcactagggtgttcagatctaacctcttagagataccagtgtttgtcgatgaagatccaatttcacatgcagtgcctccgtttttcgctggatttgcaattgggactgacggtggtgtagttatttcttgtgttgatttctccatcgatggttgattacgagttatcaccgagcttacaaaggtagctaatggttgcaacttaggtcgaccacgtcctctacctctccctttcgccatggctgacataggcggcgtacgttaattaacgtgcgccaagagcatgaggaaggagagtatttctactataaaagttttgtaatgttttgtggtttcagtatctatatagctacattcttgattgttgtggttgtcttgtgctgacacttgcagtggatttacagcagtggtgccgtgttggtttacaaaaacacaagtgccgatggattgtctacgagccacgcctgttagacaaagcaagagcatactaaatacatgaagtgcaaaacttaattatagcgatgtacctaggatttgtgagaagcggtatcacactttaaaagtaaacaaataaacaaaatactactaacaacatcatacaaaatagaaaatacaattcgaatcatattaataaaacacaactcaagtatattactacaactcttttagatgagtttcgtaatgttaaaaagtattcaaaaaataacctcattagaaataaattattttttctatataaaggacctaatgatcactaaatgttcataatttatttgattcgacaaatcgttcttatttaattgaattggcaaataaatgacgaaagaaaaaagaaaaagaatagaacaacaactaatcatggaagcagcatgcatccttcttaataatccaaataatttattgtcacctgagtttacaaaagtgactcctgatagaatggctagaagttttgttagcttctaagaggtcaactgtttgattcctgctcaacacaatgtaatttattttctataaatgagacacaaaaaatttgaaatattaaataaagattccgaggtttgaacctcgactagaatactaaggcgcctgattgaaagagctacacaattatttatgccaagtgatatcactttgttttgtttatcggtattttttctgccttttaattatatatacatatttggtaaaatattcgaccaagcagtgtcacgtaacaccgcttgggctctggtaaatccgccccctatctacttatagtaatgtgactcaacatgtttcttaattatattcaaaattcatcttgaattgcatgacaagagtagttgctctgatagtaagcaacctccacttccaaccaagaggttgtgagctcgagtcaccccaagagcatggtggggagttcttggggggaaggatgccgagggtctattggaaacaacctctctacctcatggtagaggtaaggtctgcgtacacactaccctccccagaccccactagtggaattatactgggttattgttgttgttgttgcatcttgaattgcatcagacaaaagatatttacttttatacactcattgtctgataatttttgcaaattattagggcgttacagaatgatttcaaggggaatattgcaaattttgaatatatggctgaaggacttagtgaattatgtcaatggaaggaaataatggtacatcaaagagacaatggatcattatttgattcaccagccactactgcagctgccttgatttaccatcaacacgatgaaaaatgctttgaatacttgaatacaatcttgaaactacacaaaaattggggtatgcactaccatcatctcaaaacattcagattatgtgttaattaatacttttcaatcaaattgatagatggagtgtgtaaataagaaacttcctatatatgtcaatggtataatccaatcctccccaggagcggatttatagcccagattatggcacgtgaacccatgatttctccgtcaaattagctattttatatgcatattttctaaaattggtctaatattatctgcttcttttttcttagatcggtaacattagtgttagcatggtatctctttattcttggattgctggtactacctactgtttgattgcattcttttgcttcgattttcttaatatgttgttgttgttaccacttgctgccactgcttatgttcattgtctttagccgatggtatatcggaaacaacctctatgcccttctagggtagggtaaggtctgtgtacacactaccctccccagaacccacactcactcggtttattattattattattgttgttggtataatatctactagactccatgctctgaaaaagctgaataatgcacttggttgaatactcagttgtttatccaaaggaacatagattgattatcatttaaaacttttttccctccatcctttaatggtgtgcacacgttctaaaaattctagatctatctctgatcctcccatctatattgctcggattctactaaaatgcctccggcggtgtattgaatcctacaaaattaatgtatttttagaagatccgacatgaatgctacattatatttggagaattcgagcattatagcttcccatagtactatttgtctgatttgctaatatatttcgttactatttgtctgatttgctaatatatttcgtttttttttctctcgttgtttttctcatagttcccactatctacccaacgaagatacattcattgctttgcttggttgatacccttcaaagtctgggagtagatcggcattttaaaacagaaatagaaaatgttctagatgaaatttacaggtacatgttattgatcacaataatatttacagtttcttttaaacctcttgtaaattgtaataatggtaaattatttataggctttggcaacaaaagaacgaagaaattttttcaaacgttgcccattgtgccttggcgtttcggcttttacggatgagtaactatgaagtctccccaggtaaatttttattcagtctgctttattttatgtatgtctttatttcactgtttaaatatttaacgaatatatttttttaaacttgtggttcttaattaaaaatgtgtgtataacattaccaaaaatagcttttgcattaaattttgattttaaacgtatcatgtcattcttataagtcaagtcattatagaaatgttggaattgaaaaattagtaaacatacaaaggtgacatttttttgaaataggcgtatgtaccttataccatgaggtgtcatgggaaatcacttggtcaaaaatttcactagatatctataaaaaataattattggggatacgtatagaaaatgacaccacttgtaattatagtgatttatttatttcttcaaattatgacatcgtttgtaattataatgatttattcatttatttatttctttaaattatgacaccgcttacgtaaaattctgtgtacgccactgttttgtaacagacaaaaaaagtaagacataaaaaattgaaattaattaagaaatattaagaactctggctgcaaaatttgtagttgtacataacatatcaattactgattcgattcttctttttgcagaagaactagttgaatttgttgatgaagtacatttcttttcaacaagtgggaaatttacgagtcattttgaaattcttgagctccacaaagcttcacaattggctattcatgggaaagatcacattttggacaaaattagtaattggacaggatcttttatggagcaaaaactcctaacctatgactacattgataggatgtcaaaaaatgaggtatttgcaccgcataagcctcatttaaggaaaaaccgctccttaccaaaatatttttatttaccgcacttgaacctgagacttctagttaagagtgaagaattactatgcatctaaccgtaacccttggtggtatcgcttgtcatcagtggcgaagccacatggtcacaagagtggtcaactgaccactcttcgtcgaaaaattacactatgtatatatgtaaattattacgttttagaggtatataacacatattgaacaccctttgtcgagagttttttttctacttctttcaaatttgaatacctttgaaaaaaattctagcttcgccactgcttgccattattgttgtcataacccttagtcattatttgaaatgataataacaattgtattagctttatttttcttttctccttacaagctttaattatatagcattccaaattattaatctaagaaatattaggcggagtttgctttgaggaagttttacgccacatatggtcgagtggaaaatcgacgatataacgaggcatatgaggtgaacaattttaaaatcttaaaagctgcttacaggtaattattctagcacaatgatttataaatttatatatagtcttattcgtttattgttgttcaatctataaaagttaaatctttgtaagctcttaatttctcgctgttattaggtctcccactattaacagcatagatttactaaggttctcaaagcaggattttaatttgtgccaagcccaacatcaagaagaacttcaacaactcaagaggtatcttcacttgtatcaccccttgtattagcttcattatatcttgtattttatttgaagaaaagttgaagttgaaaaaagagtttttgaagttgtgttgaaaaataatttttgaaagttgaagttgtgtttggacatgcattttatttgaagaaaaattaaagttttgtgagtggaagaaaaaatttcacccaaaaactaatttgggaacttgaaaatttctgaatatttttcccgcaaaacataatcatatttcttaaacaaacaatgttttaaattttttttgaaaaaataaagctaaaatctatagtcaaacgggagcttagacactagggacgcaactacaatcggtgaaagctagtcaagtgaagattccttgttgaaaaattaaattgtatatataagtcaaatataactttaatagactttgtcattcttggacactagcgcaactacaatcggcgaaggatcatccgttgaacaccctttgccagaaatttatactgagcgtgtgtatatatatatatatatatatatatatatatatatatatatatatatatatatatatatatatatatatatatatatatatatatatatatataggtgaaatatattgctttagtagactttgtcattttggacaccacttacgattatatgaaagtatagatggttcgaggactgcggactagaacaagtgggattgccacaacagaatttatacactaatttcttcctgactgctgctttactctacgaaccggaattttctgacgctcgtcttgcatgtgtaaagaacaccatgcttctaactttagtggatgattttttcgatggatatgttggcaaagatgaattgctcaacatctttgaattagtagaaaggtaaattttctgcttccatgcttataatatttcgacaaattaaaccccttctatatccatgttcctttttattattttagagtcggtacttggacttggggtgtttgaacaaatcgtcttttttaggtcactctttaaattatgtccctattagacaagtggactatatctggaatttgtccaaatttgtaagggtgtttttgttcagattttatccttacataaaaaaagtggctaaaatacgattatttaaaaaactgtagctatttctcaattaccagttttaaatcaggctatatctgattttttttcaggtgggacggtaattactcaacagtgcaattccattcagagaggataaaaattttcttttcagcactttacaaaacgatagaggagcttgcggcaaaagcaaatattaagcaaggtcaatgcatcaaagaacactttataaacttggtatggaaaaagtactcttagggtgtgtttggtatgacgaaagtcattttattaaaaaataactttcttttaaggaaactattttacgacgtgtgattgaaaaatgaaagttattttccaaaaaatattttccttcgtaccaaaatacacccttattctttcacattcccatgatgttcttttccagatttttttaattgtctatttttttggtatagtggcttgatttgttaaagaatatgctggtagaatttgagtggtggagaaatcagacaacaccaagcatagaagagtatttgtctgtggcctgtgaaactattggtgttagatgcattactctcataacacaatgtcttcttgggccaaaactatccaatgatgttttacagagttctgaaatgagtgccttgtgcaattgtaccagtatggtggcacgactccttaatgatgtgggatcttacaaggtaatattccttctaaaactactttttcttttcctttccaccaaaacatttctcatgtgataagtagtagccgtcttaggaaatgacttaaaagacagatgccgccgctgcgaggcgagggagcaacttgtctggcattttcacgaaacggcattaaaatataaagaagtaacacatgaaaagataaaagagatttaatatattaatgtatatacataaaaaaaactaaaattttacttagctacataatgaaattttttggagcaaagtggtataaattgacaccccttggacaaacgtgcctctgtcactccatatgatgatagataataattatcttgtaaaggagatcttcactcgaagggtatggcttagcatcaataaagtgggtaaaaatcttgaaaactagggttcaaattgcaatagaaacagaatgttatgtgatttttcttcatatgtctaaactttagtgggcggagtacttactgatatctttgctgatgggaggtaggaggtatcaataaaatagctgaggtggacacaaattaatttgcacacgccaccattatgaaatatatgcagggtaaaactatttgacaactacttctttagataacttctcaatataatttaccttatttcgtgtaaagtatgggacaaattcttaggttcgacactacttccattaagcatacaaaataagaaactaatttatagaactcactacagaataaaatttatccgcatccggtgtttacaacaaattaatagacttctttgacttacgtatagctaattaatatatattatcaccatataaaatcacttaataatgctaattattaagttatatgattttgtgtaaagatcgaatgcatgtaaatttttaccataacagtattgatcttttgatacagtagtatttgtacttgatcctctctcacgttttcttacagagagaagaagcagagagttcaccaacaaatatagtctcgatattaataaatcagagtgaaggaaaaatctctgaagaagaagctataaaacatgcaaaggaaatgctggaaaataagagaagagagttgctagggatggttctaattcaaagaaaaggaagccaattgccacaagtgtgcaaggatattttttggaagacatgcaaatcgtcttatttcgcatattcagatggcgatgagtttcgatttccagaggaaatattgaagaatcgtatcaatgaactactttttaaaccactcaagtcgtag

SEQ ID NO: 28 - DNA, 10777 bp, Nicotiana sp.
atgttatttgcaaggggttggtctcagatttcgagacgcagtatcaatagatgtcgatggctacgttcccagcaacaacaatttcaccattccaatcactttccctctcccatcgatgcttctcataaggtgaaattaatcttgtgtttttccttttattttttgtttcttagctctgttctgttagttattcttactttttgttagctgtaattgggaatggatattgtttttactttagggccttgatcttttttttttttactgcccagaaaattgatagttgcgctgaagtttattttgagattatgtgattttgttttaaaaaatttccaatcaatcaaccatacctcaatcccgtttgtcaggattggctatatgtgtttttttataaccgtggtggctgggctagcttgtgtgcaccttgactaattacacgggctacttgctacctgctacctcaactgtgtgttggtttttggtctactcaggtctatttctttccaatatggtgcaatttagactttagtaggatcgtaggaaatgcaaagctaataggacaagaaaacaactaggtacttgataggaaaactaccattttttttattcctcttcaatgatcttgaatttctgcgaggagctttgttcgagaggaagcactgactcttatctagttggacagtcttagttcagtttgagaagtcaaggaggcacgaagagctaacaaagaatctttatatttgactgtttgaactcaagtgggagattgaattgaaaaggccccttactatagatagggtgttactgctgttttttgaaatacacattggttccaatcaaattttgagctacacattgtgtgtgtggggtgggggtgggggttgacactagtgcgatagtccatgtacaacgttgcactcaaatgatatgctcaagcacattattttgtagtcaaggactcctatggttacataacgagcatgttccaacatactttgaattatgagaaatcattataaattgactactttatgtcggttgtcaacctgccacaaccatcctactttatacgtgtttgagaccgtgaacatgagttctcatgtgtggagttaacttgaaaaaggaaacaagaaaaaatgaaaggaaggatggacaaaattagttatataaggttcaattaggacataacttgcacctttctgtagttaattttcctttaaatgttctcttcctaggcaacgaggagagtgaccaagatgttactcattgtattgaagcgagtggatgaaatggaggctcgtttctggggtcttgtgtgataaaaatgtgccaccaagacttaagagcaagttctacggagtggtggttagacagactatgttgtatgaggctgaatattggcccgtcaagaagtcccatgtgcagaagatgaaagtagctaaaatgagtatgttgagatggatgtgtgagcataccgggaaagataagattaagaactaagttattagggaaaaggtggaagtggcctctgtaggggacaaattgggggaatcgtggttgagatggttcatgcattgaagaggagagacatagatgcccgattaggaggcgtgagaggttgactatggtaggtctgaggaagagtaggggtagaccatagaagtactggggagaggtgattaggcaagacatatcattgctttagcttaccggggacatgactctcgatagaaaggtgtggaggtccaattagggttgaaggttgacaggtagtcgtgagtttctcctaggtttaccagtcgtactagtacttatcttatattttctatcctggttctttattattacatgttgtttcattcgcttccgttaccctattaccttgttgttgctattgtttgttgctttatttccgctattccttgagccgagggtccatcaaaaacttctctaccttcacaaggtgggggtaagatctgcgtgcacattactctcctcataccccgcttgtgggattacacagagtatgttgttgttgttgttagtttacaaccatgtgtagaaagatataggaggcaagacctagtgcttgccggacttgatatctctctttcatccccttccctttttttcattttctctatttttggtgtattttcagttcatctcttagcttaagaaagatagtcaatattaatgtggtcttctttctgattcttccagtcattttttcttgtaagctctgtttcaaaggttgcatagtttaattgctcaatttgctgctgttattgctaatttgtgactttttatgctttattatgattgtttttggtgattattaggttttgggttgcagagtaattcattcatgggtttctaatgctcttagtggtattggtcaacaaattcatcatcaaagcactgctgtagcagaggtttgtatagtattttatttcttaaatctacagttatcatgttatacccagtgtttttgctaacatcgtatttcaatgtcattcctcttagttagcttcctcactgatggatcttatagtttatgcatctgtaatatgttgtgatcgaatatttcaagaaggaaagttgatgaaatggtctatacaattgtaaaatcattagcagttacttctccatatttaagtcagggtatgtggacctgaagggccttttctttattcctttccagctgtcttaccttatttctggatagcaaaactgattcaaaattgtacctaaaacgttgcagtagtggatgaattttcttgagtcgtgaatgactcttgtttgtatagttatgttcagcagccatttaaggacttgtctgagtagttcgaggttctgatgcaaatcatcaactcttatatttttctatcttgttcgttcctcaatccccatcctttatgtaattgccaaaggatgatgtttttcccactgtttcctattgtctttctctcaggagcaagtggacccattttcccttgttgctgatgaattatcccttctgacaaacaggctgagatcaatggtagttgccgaggtatataactttttccgtggtttggcgattgctaaatccatgatgctagatgacaacctgttccatttgtatacaggtcccaaagctggcttcagctgctgagtatttctttaaaatgggagtagaagggaagaggtttcgacccacagtatgatttgttactcccaagctcaattttcatgtgtactatacattcagccttagttcggtgcacaagcttttacgcattccaaagaaagaaactttcgtagtcatcgagtaattgttaaaaaaacaaaatccacagttcctataataaaggctgcatagctttggaaaaagtcatgattctctaaattactgagtatcttccctttaaaatactgatgaaagctaagtgactgttccttagtgaaaaaatttagacatttggttttgaaatagcagagatgtagattttgcacatttctttctgaaagcttaaaacatttttctcccgaaaaataaggaagaacaagaatttcccttagttgcatttacagtaggctctaacatgacgctccagcagaaactaccagactgagaatccaacattcacttgtcttttgcttaaattgtagtaattattggacacgtcactttttggacacaactttggatggttaagttctgtaacgttaaaattatagtataaaatggcatcaaccatatagttagagccttagaggttaagatgacaaagtggtttgaagccttgcatttagagtacaagatggcatcagatagaaaattagaggttaagatgacaaagtagtttgaagccttacgttttggaaactaggatgtttgaggataagtttctggtcgaagggagatgataatgcaggtttgagatttacgacgagatcaaccatatctgctgctttcttcaggagagatgacataaagcttaagctgcaaaataaaagaatgtgaatagaacagggatagacatgaaaaactaaagaaatcgcaacagttggcaagctaaaactaaactgaattttattatgtattaactacttcggccttcttttctctttttttatttgtttgcattttagttgaatacttgaggaaataattctctatttattagatatgcaattttttgatatatttattatctaatgagcaatggtgttcattttaaggggtgcgaattgaagcctttgcattaattgaagtccttgtatttccaatttaagtgcatttgtggtggcaatacagatagcaccctcttgaagtaatatactttgatggtgcttcttgtgtgtgttaagtggttattgtgccgttgattggccagatccattgtaatgtagattttttcaagtttgtttcatgtcaacgtagcattcatttttttcatacatcctcaaaagcaaatacacgttgcactttgttgtaggttctgctgttgatggcaacggcactgaacgcaccggtacttagaccccaggtggatgttgattctttgtccagggatttgcgtaccaggcagcagtgtatagctgaaatcaccgagatgatccatgtaactattccatctctttttcctgttaggatggaaagaccatcagttgggttgttagatgacaagattttaacactcaagttcttgatgaattattatgttctggactttggtacaagtgtcagatacaacacagatactaaatatgtacacgtacaatttaatatgagtttaatgggtattttgaaggttgcatacaaaagtaccccgaccgatgcatgaaaggtaaaatgaagaattcagataatatagatgaactacgcatttagaggataggtgtagatgttaaattcatgaaaaagaactcatatataaacctgattagtaaggaagcaacacggaaacgtggggtataactgatatatctcacctgatttgtaaggaagcaacgggaggatggagctaaaagagaacttccacatagtatgataagtactaatttacccataacaatgcatcaaagaattgcagttgcttggaaaatttgggagttctgttctgaatttgaaggacagctgggggatgttaatttcttaaagggtggcagatcatgtctttcttggggaagggtagagatgcagagttatttgtgctggtccagttagttgtataaggctgactgctgtaggtttttattttttaacaacaaagcagttgcagttgccagctgttgcctgcttgtttgattttcttccgtatttatgtggagcaagacaaacagttttctcctcttctttttcgggtcctttttccttagatgctcaatgggccaacaacttggcatggttgacgcagatcatatgaatgggcctacattcagaaaaacccgcatggccacttagttgatgtttcattctctcctctagttcagattagtttattaagtgtcaaaatgccatttcattacaactttcgtcattcaagtttcttttcttttcactctatcttaggttgccagcctactccatgatgatgtactagatgatgctgacacacgacgtgggataggttctttaaactttgtgatgggaaataaggtacgtggtactttcttttccgaaatatgctgttccctgttagagttttccatataatccaagcaagcagatgttgcagtagtgagatggccgttgttcatatcaatacctagatgaagcaagtataaatttgttatctttctgttccatcttaaaggacgctatttaagcgaaggagtttaaaatgttatttgacttgtatattattttaatagcagaagaagaaaatatagattgatgatgaaaagttagttcaatagaaaaatatcatatgaaagtttaaaatatagttaaataagtcgaattcttgaaacttgtcaaaattgtataggaaaatactatgaatggaataatgtcaaacattttgaacgtgccaaattgaaaaaatatgttgtattaattgaatcagagggaatatcttagatcactgagtagaacattggatatgacatgcttactgcaggcagcataatatttttcttctaattatgagattattgaaatcagtcttttttaaattatagtaggccaagtgataaaggagggtcaggactcatgctttcctcttgggtggaagagcaattttcatccgtgggttatatttaaccaaagtaactgttataatatctcctctcttatttgatgcagttagctgtactagctggagactttctgctttcccgagcgtgtgtggcacttgcctctttgaagaatacagaggtataccttgtttcctcttggctctagtaaaacattaaatatttttgcagaattgacaagagtggaaccatagtgttcataatactcttgttattaaggcttgttagttgttatgttctattcctatttatcagaagtttttctttttctgcgggatatatatcattctacattcttttgtgtctataattttctcgatggacaaaaataagattttatcgtgtctagtattagggttttgacactcctttaactattgactgcttgtagttttatgtattttaatctcttatagttggtgtttttttgtcacttgatgtaaattgtatcacaaactcgtaaaactctgggttttgcttttgttttatttccagtccagcaactctatataggtttttcttttcctctcggtttcattcacgcctcttattttgcgtctcctccccaaataaaaaaaagagagacgaaaaatagcaacaacagcaaacagggaagggattctagctagaacactgattttagtttaagacttctgctattttcagttatacctcttgctatcctctcttcagctctgatactcagatcttgtgacttgtaggttgtatcccttctggcaactgttgtggaacatcttgttactggagagataatgcaaatgacgacttcttcagatgagcgttgtaggtatgctggttccagtgctgattagtttttgatgtaccctgattgaaattaactcaactgaaatatgtcgatatctcgagatattagaaagtttcgtgagtttaagctagaaattatgtcttccccaatttagttatattaattattagatcaggcttataaaatagtagagtctgatttattcaattaatacctctaacaacaacaaaaaaaacccagtgtaatcccacaacatggggtctgggaagggtagagtgtacgcagaccttaccactaccctgtgagggtagaaaggctgtttcctatagaccctcaatcaaggaaaaaaatgaaaaggaagcggaaacaagaagatgcaaaaaatgctctaagttgattctttcagcgagtagctaactgcagttttagtaagtattgcttctggcattttactttctgctgtagtgacaaaaagagagaagggagaaaggaagaggaagaaatagttatgcggagagcggggagagagagagagtataggggaggggggtaattgaagggaggaggggaaaaagagagagattctaatactcaaaacaataatactacaagcaaaaggatgcttgcagatggagaaaataaggctgagcttgtatgtctctcaaggacatcacattgaatttaaattttgggtattaggcatcatttctctaataaatggggtatttcgtgtcagttgatgcatactaaacatgcacttttgcctagctttctcaccttatggtagctggtcagagtatatactaacttcagtaatatcatctctgttttaggacaccaggtgttttactaatttccccccccccccccaatagttgcaaaaacattcagtatgagatggagggttgtgggatcttgaaatgtctaattttggtgaaaaggatttcaaaggggcgtaagcttgtacctcatgtcatatgaaacatccatgttagttggtgcagttttaatattaggaaatataggggatacgtagaagatttagcacctctgctgtttacgtagagtaaacgtatcttcatgacttgtgaagtgcgtcatgtatgcattgtgctaaaggttgcttacaatctggtttactatctacatccacttgtttgttagatttgttttgaccaacctttctctgaaattaatgttctccgtcatcttttgcagcatggagtattacatgcagaaaacatattacaagactgcgtcattaatttcaaacagttgcaaagcaatagcgctacttgctgggcatactgctgaagtctccatgttggcttttgactatgggaaaaatttggtctgtgtaatcttctacattctatttgacttaatatatcacttaatggtgtaatgggatcagcaggacgaaataaaaatagttctatgttccaaccttttctccattgttgctatcgtggtggaaatagcatgtaaatactcataagtgactctatgcatcttcgataatctgaccactggtagaaatttcagtttggcgggatatgcaattttcttgtgattgtgcaaataaagacctgtttaagtagtttaccttttttttttcccggtgataaggttccgtagttctgagttcttgttttctatgtctattcatgcagggcttggcatttcaattaatagacgatgttcttgatttcacaggcacatctgccaccctcggcaagggttcattgtctgatattcgtcatgtaacctctctgttcttgccaattgtttctcatatcttttgaactcattttagttgaacctaaaagagtggctatgcagtttatgaagtagagagctttttcttatgggcagatttactcatcaaaaggaaaaaaaaaattacagcatggtcagatatatgtttataggttacgaattagcaagcaattgttactccaatacttcaaaatcttattatcattattgtcgttgttattactaataatactactattaccgccactatcactactactactaataccactaccactacttcaccaccgctaccaccatcaacacggctgctccactgctgttattatttgatagtgtaagtaggattcaactacttcaagtggaaagttgcgagctcgcatctttctctagaatatttgaaattttggggaattgttcccagtaccccattagtgtataagtgaggtatgttcttcctgtctactctcatgatgcttcctttctctccttaacttttgttccagtaatgatgtgcgtgaaggttttttttcatatttcatatttccaattaaattttcgatctgtgtgccattcttagtttcatgtagactaaggcttccagatattatacgatcaaaagtaggtttacactctgtcgataattctttgcatgatgtgctcattcacgattcaacatcatgtcttaagaaggtattctcaaccattttcccttagtcttgagtttctctgtaacttttgtgtttgtaggggattgtaactgccccaatattgtacgccatggaggaatttcctcaactgcgaacggtggtggaccgaggatttgatgatcccgtcaatgtggagattgtaagcatttttctgctcatcttttcctagcactttctatgaccactgtattcattttttcctagcatgtccataataacctctgtattcatattaaccttgtggttgaatgttcttgtacatcttaatttggcacgctttagtgcaaatggtgataaaagatatgtgtatcctaattatatactccctctattccagtttatatgaacctatttccttttttgtccgttctaaaaaaaatgacccctttctaaatttggtaacaatttagctaaacttacaattctacccttaatgagatgcttttataaccacacaaatattctgggccccttttcaatttgtttaggaccacaaattctaaaagttttcattttttcttaaattcggtgcccagtcaaacaggttcacatattggaacggagggagtactatagaggtcttttcctccaaatatgtcactattttctattaagtctatagttttagttctgtattgaattgctccttttcatttgttttctattctaaattaagtattcccatcaagtcatcaacaagatgcagtggttgagtggaactggttattgcaagtttgtcctttcgaaattcaatgtggaatagtttgtgttacaaccttctgttcgaaagtctattccagctctggggttttgtttcttgttagcaaccgcccattgttgtaaactgatttttggttcttgattttttgaaaatgttggaaagaatatccactgttaggttagtgctcggatcttctggattctcggttgactttttattactatttttctatatgaagatcatgttataaatgtgttgttgccagcatctgtttacgttccttgtcctgatcagtgttggcgtcaaattctggtagtcgtgaataatcaaccaaaatataccatgaaattgcaggctctggactaccttggtaagagccgagggatacagagaacaagagaacttgcaagaaaacatgctaaccttgcctcagcagctgttgacgctcttcctgagagcgatgacgaggatgttcagagatcaagacgggcacttgtggaacttactcaaagagtcatcacaagaacaaaatag

SEQ ID NO: 29 - DNA, 5782 bp, Nicotiana sp.
atggacgtggcaatatctaccaacgtatggatgctgcacatggccacctccaaaatacctccgccaccagcagctacttgtttaatttcctctttcagccgagaaaagccgtcacttgtatcaaaagccagctgcctctctaccgcagctgcaggccgcagcatgaaaactgaaccatcacctaatcagtactctgctatttcatcttcagatcaaaatctctctagacgttcagggaattaccaacctaccatgtgggattttgagtatattcagtccatacacaatgattatgcggtaatataatttgtttagcacatactcatgttattcaataatctgcataattaatttgccgtaatatcattcaaaagataacgtatgtgggttagggacaacccttccctaaagaaggtaaagcagctgctttagatcccacgttcgtgggggccccattttttgttgcatccaataggctatatataacttaaaatgaaaaattatatgaagtgaaaatgtttgatttctttctttaacaagtatataaaagaaggaattgcaactgctatgatttctgtcagggtaattgcatttgaaatgaatatcgaactcgaatttcataagaaacatgtgatatataggaagaaacaatttgatgaaaatgtcgataatgaaatctcaaaatctcttgatagacaagactattttttcacttcaaaatagatttgaataatttgaagcctataattttttttttaattttctatttagcgggaaaaaactgaaatcactagatgaaggaaattttaaaaaatattgacttaatcttgaatgttccttaaagtataatgatcaatctgaaattgatcatttaaatttattttctaaattaaaagtattaagaaaaatagtacaattagaagataataatttaattgatatatttcatcaaataaaggatttgattcttttccaaatgcctatattacttatagaataatgttaataactccaattaccgttgcttcagtggaaagaagttttttaaaattaaaattgataaaatcttcgagagagacttattaggaaaaaattgtgtataagaaaattattaataactttacatcttaaaaaagctaaaaaattagacttcaaataaaaaataacattttaaaaaaaagaagttaaagcccctcgtaaagtttggctaggccacaaaattggttgggttgcccctgacgcaggttaatattcgagttgatcatttgtaaatgtgttgcgcagggaaagaagtatatgaatcgttttaacaaactgaaggaggaaatgaagaagatgataatggccgagggatcacaagagttagagaagttggagctgattgataatttacaaaggcttggagttagttaccacttcaagcatgaaattatgcaaattttgagcagcataaagcagcacagtactccagcagattcattatacgccacagctctgaaatttagactcttgagagaacatggatttcatatctctcaaggtactgattttgccaaaccaatttccttcttctttcatgcatctgatatttggtcattttattttgatttcttccttgtgttttagatatactgaacgatttcaaggatgagcagggtaacctcaagcagagtctctgtaaagatacaaaaggattgttacaattatatgaagcttcatttctctctaccgaaactgaaagaacttttctagagtctgcaatatcacatctacagaattatttgaacaatcatttatatggtgaagacaatgtaacagtctcattagtcagccatgccctggaacttcctttgtattggatgatgttgagagttgagacaagttggtaccttaacattaatgagaatatttcaaatgctaatcctcttctgctcgagctggccaagttggacttcaacattgttcaagcaacacatcaagaagatttgagaatcctatcaaggtgactagctatcttttaagtgactaagctttaatttattttataagagtcgttcgcataaggtatgctctcttctgcgggttgcaccatatcctactatttttaatgatttaaacctttttttcttgcaaaataataaaattatttctaattatctacaaggtcaaaacaagaaaaatatttatacagaagaacaacgtaggtgataatgtgtgaaaactcgatggtgaaaattacattaagttcatctaaaataaaggcaaatcctttttaaatttctatcctcaatgtgagattttctagcgcgtatcctgatttagtcgggtccaatacagataccaaaaaccagatagaaaaaaaggttttggaggagttgagatactactctctaatacattgagtatttatctaagaatagtttaagtccaataattacttgacagtcaaaaatgtaatatataaccgattatcttgaaattaatatgcctgataatttctctcatataacattaattagttttcatgtaaagatggtggaagagcacacaccttgcagaaaagttgccattttcaagggatagactggtggaggctttgttttttgcagttgggataatatttgagcctcaacacagctactgccgaagaatgttgacaaaggtcattgcttttgttgcagtcattgatgatatttatgatgtttatggcacacctgatgagttggaagttttcactaatgctattgaaaggtaaactttagggaagcagtaaatttggtgcatatagatattcatttgctaattaaattttactaatactttcataattcttcagatgtttataccaaactaactaatttaattttagcagttaaaaaactaaaaagaggatacacattatttagcaatagttaagtgatattgtcaagaaatgattacaaatgatttttatttctgccaaatagcttctaattagaagaatcgtatcgagaaacaaaagccacaatttggtagataggtagtaacatacaaggaaaaaacgtattcatttgaaggagaaaaaaaatcaatagaagtcataaaagaatgctgaaaatagtaacctatataccattaaagcctggatattgaaactcaatgtccgtggaaagccatgtctctaactataagcctggatattgaaatatctgatacaacaaaatacaaatagaacaaacctcaacaaaaatcaaatagtacaatattccaaatcatacttcttttttaaactcagaagctaaatcattcacccacacctttacatttgccaactgaaattagctaaacactatataaaatattcattaaattgattgcaaagctggatgtattagtaagtgttttatgtgtgcatacacatatgataaacaatctaaaaatctaaaagcttacatatagaaaactgaagaatcgatgcaatctttcagggagcaaagtctaacttctctgacttatttgtttgtagaaaaatgtattgacctgaagccttccaaattctacctaaaatgatatccagaggactactccattttaatatattttcaaatcattcttcttcaaatcattacaataaagaataggaattattggagtagtaaatattgagactgtaatgttttttacaataaagaacatgaatgagtggagtagtaaatattggcacatttattcttacaatatgataaatagaaaatttggagaaaagggcaaaaatttgaggaaaaaaataataggatctttcgccgaagagaagtgtcaagccaactctatactttcctttttatatatagatagatggattgtttcgctctctagaatggtttaaaggaagacaggtgcctttaattaggacttttacaaaggaaccgttaattgctggtttttctaattaaacatatgtgtctttgtgcttgccatgtgaattaaattttaatttattgtaacaatatataaattcagatgggaggtaaaggcaatggagcagcttccagattatatgaaagtatgttaccttgcacttttcaatattaccaatgaaatggcgtatgagattctcaaagagcaagggatcaacgtcctaccctaccttacaaaatctgtaagatcgatttattctgcttaaaagtttttccttttttcagttcctaacttttttcattcaccttctcgttcctcgaatcaattgcatttttaaaattatgggttcatcacaatttgatcattcgttgaaaatttagtaaaatttcacacatatatttatgttttatgtcaaaaatgatggatttagttgaacctattaaactcgtgctacatcttttatttgagacaagttattaattagtgggcagatttgtgcaaatcttacctacaagaagcaaggtggtactacaatggatatacaccaactctggaagaatacatggataatgcatggatctcagttgcagttcctatggttttagtccatgcattcccccttgttaccaatccagttacgaaagatgcatttgaatccttaagcaaatatcctgacataattcgctggtctgctacaattttccgtttcgccgatgatttgggaacatcatcggtatgcttttatacctttctctcaaataaatatatgattcatgatttgatgatatatttgaatggaggcattgtgattgaagaggaaatttctaatttataataaactttatatgtttgaagaattaacccaaacagtcgtccacccaactacttaaattaaaaatagacactaaaggtataattataatttatgcattatatgtgtataatcactgtataatcgatgtatatgtctggaaaaaagtaaaaaataaatatggccggctattagtgtaaaaataaattgagtgtacctttaggaaaagaacccttatttatcttttggggcaaaaggggaaaaaattccaaaaaaaaaaagaatgatttacaagtgataattgaaaaatagccacaatttcaaaagtaatagaaatttagccactttttcatgcaaagataaaatctgaaaaaaataaccttaaaaatccggaaaagttttagcaaaatatgctggagttcgaattcttttacatataagattccagcataatgtgctgaagttccaacataatatgctggaagtttataagcaggagcttcataatccagcatattatgctggaacttttcgtgtttcagtaaaatagtggttatttttcaatgactttgtaaacgctggctaattttcaattatcagttcgaaaactggctagcccgtgctattttcacgggcaaaagaatacaacatatgaatctggtacaacgctgaaattgtttggccttcaatataaatataatgaacagaggtaacgaattatatatgtctcgattcatttaatttatctatttcctataattaattcaggaggaattgagaagaggtgacgttcccaagtcaattcagtgttacatgaacgaaaaaggtgctaccgaagaagaggcaagagaacacataagtatttgtataaaggagaaatggaaactcctgataaacacagctcaaagggagaactcattattttctgaaacattcattggatgtgcaataaatattgcaagaacgggacagagtatttaccagcatggagacgggcatggaattcaaaattttgagattaaaaatcgcatttccaaattattttttgagcccatcagaatttcaattccataa

SEQ ID NO: 30 - DNA, 4346 bp, Nicotiana sp.
atggatcttaggaggtcaggaaactacaaacctagcatttgggaagatggatatgtccaatcacgagctacattttacgctgtaagtccgaattaagaaaaaaaatatagtttgctgctcatcttctgtctttatatattttctaaccaatttaacatatatacacaaatagtatttccttaacatgctatttattgttcttctcttgtgttactaaataagataatatatatactgacactgacctgttgttatgaatcgtcaaacctgaatgtataaaaaattgtacactgtcaatcaatcgaagctaaacccttatgagaaaaataagtttatattatcaactgacgtgacaattacttctttatcatgcaggaagagaaacattttgaacgagctgccggactaaaagaagaggtgaggagaatgctagggaaaacgatcgacccatttgaacaacttgagcttgttgacattttgcaaagacttggtttgtcctatcactttgaggaagaaattgatagagttttgaagcaaatgtacgttaatatttatactactaatagaaatgatgggcagaagagtgaagatttgtatgctacagctttagaatttcgactcctcagacgagagggctatcatgtccctcaaggtacttcaaaatttcttttacgttttcttttacagatttcatctcttaatttataatgctgctaaattaatcccctgaatcaatctccgagaacttaaccaaataagataaattaatcaaaaaaagagagaggtaaagttacaaaataattgtggaaaacataaagtttttgcacatgtcttcttgcatccactaccagaaaaataaggttgtcttacgtgtcagacaatagctaaaggtgtattatcacttttagcccgtgtcagaaactatttatatttggtaacccaaaaagtgtataaaatttgtataatttttgtatagaacatatagaatgcatatatatttggttattattttaagagcggttatacaatgtcattttcccatagctaaagagtcttttgagagtcgtcactacaagtccatttccggtagttaatcgacaccttatcacttaaaaattacactaagtatataagaaaaaaaatattatgcataaattatgttgaatcttcttaacttctttgtatatttacttctgttggttttttaaaagacggggcagcaaaaaaattaaaagtattgattgaaaaagtctctcaataattttattaagcatacctaggctttaaatagccaattaggaacataatctgcataggaggaatttaaaaattccaaaatatctcaacaaacctaaaaaatccaaacgaaatttaattcaaaaaagtagatttatcataaaactaagtaacttattatgctaaaaaagttaatgaaaaggaacaaaatttcaacacttctcctttacttcagttgatgcaattaaaaaagttgctcctcctcaattcttgcttcattgtttgtccttgaggattgttttgagcatcgctaaaattgcacgcttttgtagtgcaattctttttcttttttttcttctttctttttcgccttatggttttgtgcatgaacaacacccttagtgaccttgtcctatctaaaatctcttttgaaagtatttgattctggataatgataggattttcaaggattgctggtaaggattattcttcctttacaacattcaacaaatcataagttttaagatatgattttattttcactgagcaaattcgatagtaatcgtcagtgaaagtttgtggggcattcaaagagggattgttgcttgccatgtttgaaaatgagtttaaaaattgatattggttaaaaatgatttggaaatagtttttttggaagaactcacagatcccgtaagatcaatgaatctttgataccattgttggttttttaaaagatggggcagcaaaaagattaaaagtattaattaaaaaagtctctcaataattttattaagcataccaaggctttaaatagccaactaggaacataatctgcagaaaaatctgcataggcagaatttaaaaatcccaaaatatctcaacaaacctaaaaaatttaaaactaagtaacttattatgctaaaaaagttactgcattaacggaaagcaacaaaatttcaacaacctctttatggtacccgttagtgaaaatctcgactctggcaagtagtttaagatagcatgattttatgtttgttcttatatagattcgtttcttctttccagagatgttttgcactttcatgaataaggaagggaagttcaaaacaagccttgttgtggatactaaaggactgttgagtttgtatgaagcttgctatctttctatggaaggtgaaagcattttggaaatagctcgagatttcgccactaattatctcacggaaagccttaagaagaagatagatgagaatcttactgagcaagtaagccatgctttagaaatgcctctgcattggaggatgcagaggctagaagcaagatggtttatagaagtttatcacaaaagagagaacatgaatcctcttctacttgaacttgcaaagttggactacaacatggtacaagctacatacttagaggaactaaaagaaatgtcaaggtgagatatggcgcttcgtacgttagaggcatatttagacattgtaggttataagttgagggagtgagtattgaattagatatccaactatatatgcttctctatcgaacctgcaaactcatggctagatccaccagtgtatatgagtttggaagtggcacagtgttgaatacacacaaaaaaacgatttaattttggtactaaatactttcaatcctgaaaactttactcgacgatatgttttaatctgattataatgcaggtgggataagaacattaaacttgtcaaaaagatgagctttgttagggacagattggtggagggctttttatgggctgttggtttcactcctaatcctcagttcggatactgccgaaagttttcaacaaagatgtctgtactcctcacagcaattgatgacatctatgatgtttatggcaccatggatgaacttgagcttttcactgatattgttgacaggtttgtccacatactttagacctttttcctctatcccgactgttataatgtcatgtcatctaaaaaataattataggtaaccgtccaaaaaaagtagggtaaatggcctggaaaataaaataagttacctgctatgaatatattgatagtgtaaaaattcttgacgctatcagtgtatataagttaaatccttttttttttcacttcatttggatggtcaagggggtgggttggactggaatggaatatcgaatttatttttgatgaggggcataaacttattgtggttacatgttctgaagatgggacatcaatgcaatagagcgactacctgactacatgaaaatctgcttcctagctctcttcaactccatgaatgaactggcttatgatattctcaaagaacaaggcttcagcataatttcacatataaggaagcaggttagcaaatttttcttccctgtaatttatcttgaatttctgatctcctcttctcttcattcttactgacttatacatttgacattttttggtaccaaatatttcagtgggctaacctatgtaaagcctacttactggaagtgaagtggtaccagagtagatacacaccaagcttgaatgagttcctgagaaatgcatggataacaaacactggtcctgtactaataatgcatgcttatttttgcatcacaaaccccataaaggaggaggaactggaatgcttaaagaattatcctgctattattcaatcgccttcactaattcttcgtcttgcaaatgacttggcaacttcacctgtaagctatgtttatatacgattttctgtgcaaggtcagtaagttatagtatgatctgttacacaagttatttcgtttttttacctttgttcaggatgaaatcaagaaaggggattatctgaaatcaatacactgctacatgcatgagtcagggaggtctgaagaaaatgctcgaaactatataaagaaattaattgatcagacctggaagaagatgaacaaagatatactaaggggcagctctttctcaaaggattttagaactgctgcaatgaatcttgctaggattgctcaatgcatgtaccagcatggagatggatttggaattccagatcgtgagacaaaggatcggatctgctccttgttctttgagcccattcctctgtcatga

SEQ ID NO: 31 - DNA, 1532 bp, Nicotiana sp.
atgcttcatatgattggtggagaaccgcaccatgtccttagagatttagccaaaaaatatggaccacttatgcaccttcagttaggtgaaatttctgcagttgtggttacttctagggacatggcaaaagaagtgctaaaaactcatgacgtcgtttttgcatctaggcctaaaattgtagccatggacattatctgttataaccagtccgacattgcctttagcccttatggcgaccactggagacaaatgcgtaaaatttgtgtcatggaacttctcaatgcaaagaatgttcggtctttcagctccatcagacgtgatgaagtcgttcgtctcattgactctatccggtcagattcttcttcaggtgagctagttaattttacgcagaggatcatttggtttgcaagctccatgacgtgtagatcagcatttgggcaagtactcaaggggcaagacatatttgccaaaaagatcagagaagtaataggattagcagaaggctttgatgtggtagacatcttccctacatacaagtttcttcatgttctcagtgggatgaagcgtaaacttttgaatgcccaccttaaggtagacgccattgttgaggatgtcatcaacgagcacaagaaaaatcttgcagctggcaagagtaatggcgcattaggaggcgaagatctaattgatgtcctactgagacttatgaatgacacaagtcttcaatttcccatcaccaacgacaatatcaaagctgttattgttgtaagtacttttcaatactacaatcctatgcttgttcttactcccatattcattgtcatagctacaagatttttgatttttttctacaaataagatttcttgttagaaaaataatctaatattataacatggcgattattaatttgcaggacatgtttgctgccggaacagaaacttcatcaacaacaactgtatgggctatggctgaaatgatgaagaatccaagtgtattcaccaaagctcaagcagaagtgcgagaagcctttagggacaaagtatcttttgatgaaaatgatgtggaggagctgaaatacttaaagttagtcattaaagaaactttgagacttcatccaccgtctccacttttggtcccaagagaatgcagggaagatacggatataaacggctacactattcctgcaaagaccaaagttatggttaatgtttgggcattgggaagagatccaaaatattgggatgacgcggaaagctttaagccagagagatttgagcaatgctctgtggatttttttggtaataattttgagtttcttccctttggcggtggacggagaatttgtcctggaatgtcatttggtttagctaatctttacttgccattggctcaattactctatcactttgactggaaactcccaaccggaatcatgccaagagacttagacttgaccgaattatcgggaataactattgctagaaagggtgacctttacttaaatgccactccttatcaaccttctcgagagtaa

SEQ ID NO: 32 - DNA, 1672 bp, Nicotiana sp.
atggaggcaaaacacttatcattcatcttcatttcagtcttgatattcgtttccttcatcattcgtttatttcagatatggaaggcatcaaaaacctttaacaaactattgcctccagggccatggagtctacctttgattgggaacttgcacctattaatgaatggccgccttccagtacatcatactttcagaagtctatcgcgaagatatgggccaatctttcacttacgtcttggagaaatatcgatcattgttgtatcttcacctgagatggcaaaagaaattatgaaaactcaagaccttcgctttgctactaggcctgaatttatgtctggagacattattttctacaactacacagacattataacttgtccatatggtgatcactggagaaatatgcgcaaagtgtgcatcgtggaacttcttagtgcaaagatggtcaagtcatttaattcaattcgacaagcagagatgtcaagtctcatttcatccattaactccatgcctgatgactcattgatcaacttatcagataaaatgttttggtttacaagttctgtaacttgtaggtcagctttcgggaaagtgattcatgatcaacataagttgataatgttggtgaaggacatagcatcattagctgcaggatttgacttggctgatatgttcccttcccgaaagtggcttcacaagattactggattgaagtccaaaatgttgaaggttcacacaaaggtagatgcaattttggagaatatcattaatgagcatcgggaaagtcgaactaacggtaagaagggcaatggtgagactggaggtgaagatttgatcgatgttctacttcgagtcatggagagtggcgaattgggaactccactcacaaagaagaatatcaaaggtgttatttttgtaagtctaatgccatatgagatatttcatttcattttattttttatagtagtatttaaacattgaagttaatatttatgctagagtacaatattgaaacgttagaaattgtatatatcttaatagttttctttacatgcaggacatgttcttagcaggagctgaaacctcatctacaacaattatttgggcgttggctgaaatgataagaaatccaagtgttatggctaaagcacaacttgaagttagagaagtcctaaaaggaaagagaacatttgaggatattgatctagaagagttgaagtatctaaacctagtgattaaagaaacattaaggttgcaccctcctgttcctctattactccctagggaatgcagagaagaaacaaaaattgacaaatatacaatacctatcaaaactagagttctggtgaatgtatgggcaatgggaagagagtctaaatattggcataatccagaaagttttatacctgagagatttgagaataattctattgatttcaaaggaaaccactttgaatttattccgtttggtgcaggacgaagaatatgtccaggattattattcggtttagttaatgtaggacatcctttagctcaattgctttatcactacgactggaagactcctcctgggataactccagacaatttagatatgaccgaaacaattggggtagctggcggaagaaaggatgatctttgtttaattgttactccttttggtctctcttaa

SEQ ID NO: 33 - DNA, 621 bp, Nicotiana sp.; identical to SEQ ID NO: 12

SEQ ID NO: 34 - DNA, 786 bp, Nicotiana sp.; identical to SEQ ID NO: 13

SEQ ID NO: 35 - DNA, 3635 bp, Nicotiana sp.
atgatggcctctctcttcctcagattccacttggccaggtttactatcttcacttctctcagtctgattttatgtgatgttgttagactgatcgcaaactaaaaaaaaataaaaattgttatatactgcaattagtccgatcgaaccagaggcagatccagaatttggaggctccggttgccaagctaatcgatttgatcaactttgaaaaaaacaaatagtactaactatttgtcttttgggattctaatgggagcgaggattttgaaaaggaaatgttgttttaagtgtgggtaaaaaaaacaaatagtactaactaagagaccaaaaaaaaaagtcaagatttactaacaaagaaagatatggtcaacaataattaaagaaagaaaataaggagaactgaatagaattgaagaaagaaaaataagtgaacaataacatcaaaatttaccgagaatacgtgatgatgcagcaagttaaaaaggttttaaaaagttttgtctcagtggttcgatcccttactgccaaggaggatttatcagccatttaccgcaggcatcttaaaatcttttgttactccaggttgcactcggaatatttataagatttcgcagatatgcatacatatatagttaagatttcgaacaaagcttgcgggtggtgtaccaccccgcgggccttagtagatccgcccctggatcgaaggtaagtgtggttttaaccaaagaaaatttgttcaaaaaaataacgctccactaaataaaataaaaaagcagtagctatcttttcctaatctaatccttgctttagtaaatgatttataaattttgcggagagataaatggtaatttgaagagatataaagggagtatcaaaaataccttcaaaacttataatcataaatatgtcatgacatttcggttactatatatgcatgtaaataaaggtaaaacaataaatttaaagttaataattgcataaatttttgaataaacagaaaataaaagagtgccatatacatgcttcaaaggaattcaaaaatagcgaaaaagaaatataagtattctgtgtgtttaccgttgaggtatccttctatccttagattgcgagtactatctattgtttgattgctatctttgcttcactttaatatcttgttgtcgttgttagtatttgttgctactacttcttttcttctatttttaggttctatcgtaaatatactctttaccttcccgataggggtaaggctgtgtacactctaccctccctagacctcacttgttggagtttattagattgttgttgttgttgttgttgttgtttgtgtttacagtcgacggactttaatatcggttaaagttctaatataaatgcatagctctagtatgctgatattaattaataaaatgatacagtgcaggtgataagagcattaggaatggggaaggtaattcaatctaaggacaccaagttttcagagggagatatagtacttagccgtatttgccctgtttcagaatttggagttatgccctcaaatttacttcagaagattactcctgcaattgggattgcgttgcccgattatcttagttgcttaggtatatacctaatacctctccttcaccaattttaattatcgtttttacagtcatgaacttaaagcaaaaatcaagtaatttcttttatttatgtgtaataggaatgcctggtataactgcgtgggtgggcatagaaaagataggaaatgctaaagcgggatcgaatgtgtacatatcggctgcagcgggaggagttggaattatagctggacaactagccaaagtaaaagggtgtcgagttgttggaagtgttggttcagatgataaggtattatttgtgttaaatcctaaattatttactatatgattgtttgatattacctaatgttccatgcgtttcattttatatggcgatatttaattagacatgaagtaatttaagaaataacaaaatttgtggcctaattaaatatgtcaattataagagtaaaataaaaattttaaagtaattatttttgaaatattaaaaggtgccttatattcaaaagcaaagagtgtgtaataaatgaaaggtgcccttttttttttatttatgtatattcaataacagagggacttatgttgtctaactagagaattggaattaatacatttttgcctcaaaacttatagtatcagaccttttctcttacgaaaaatctaggttaaaattttacagctcacaacaacgattttagaagctgtttggtaactcggttaaatatatattctctctgttcacttttagtttttcacttttgactttgcattcccttttaagaaaaaataattgaaatatgtattttataatcccataataatgataacatttcaaaaaaatttaggaaatgatatggagagtaagtagttaattataagagtaaaacaaggggaaaaaaagattgttcttctcttgatttgcgaaaatagattaagtgaaagtgaaaatatatttttcataagagtaagtcttttcaactggagataaattaaattatgcttgtaatctggatatatgcttcctcttcttttctcttggtaggtgaagctgttgaaagaagaatgtggctacgacgatgcttttaattaccgtgtagagacagattatgatgctgcattaaccaagtaaatttctttgcttcttcaaaatatttaggtttttggtagtactaattactagctagtaaatctttttattttccttggactacttttctagcgattgacatgctcataatttttgtattacctcttacagatatttcccaaatgggattgatgtttattttgacaatgttggtggtaaaatgcttgaggctgttcttaatcatgtcaaccacggagctcgtattgcactttgtgggatgatatccgagtacaacaaggtaccctttactattttaatacatgtataatatgtgtataactatatataatttatgtataccgatcaaacaaagtaaatggtaaatctgaccggctaattgtgtaaagattcctaacttttgtacaaacttggtctttttcttcattccgctattaaataaggacagcctggtgcacaaatattctgcattcatgcagcatccgagcaagggctgcaccctaagggttgtgatgtagacagcctaccataatgcaagcattagtggttgcttccacagctcgaacccgtgacctataggtcacacggagacaactctaccgttgctccaaggtcccccttcttcctttcaagctattgaaaaaaaaaactcaaatcaccaattttttatttttattttttggattttgcaggtttggacagaaagagaaggggttcggaacctattgaacatggtgggtaaagaagttatgatgaaagggtttatggtaggttcatattataaccactttgaggaattcataaaagagatggaagtttacttgaaagagggcaaaataaaatccaaacacaaaatctacaatggtattgagagttttttggagagtttagcatctctattttctagctctaatgtcggtaaagtaattcttcaagtaactccttaa

SEQ ID NO: 36 - DNA, 3575 bp, Nicotiana tabacum
atggcagaaaaaatcaccagccacgagaacacaaggtatttacaaaccttgttatgtctattaagttttatgtactgatagtaaaaaattatttacggaatcagtacggttattaggtaattataggtaaatctctactataagcatagtagtaatatttaagttgtatgatcgatcaggtatgcagtggtgacagggggaaataaaggaataggatatgaaacatgcaggcaactagcaaaggaaggaatagtggtagtgttgacagcaagggatgaaaggagaggaattgaagctctcgaaaagctcaaggaagagtactcaagcaataaaactgatgatgatcagattttatttcatcaacttgatgttatggatccagctagtatttcttctcttgtggacttcatcaaaactaaatttggaaagctcgatattctggtactattcactactattatatttatcaccccatcacttaaatctagggctaagttggttgggttagtgatttcccacgtgagagaccttagatccatttttttcccagcagccttctcctcgcgctgggatgtctagtgcaatttatattttctatgtgatttgcgaactattgcacagtaaataggggcacacatccgaagggtagcggctgctgaacctgagaattttcccccaaaatatcgtttagaaaaaaacaagaagtcatctattattacttttttccagatccattcttcctgtttcaatggatgaagtattaactaattaaatgagccatttaaggaaagataaagggtgattaaataattactagtattaaatgactctcttaaggggtgtgtaaaacccataaaaacaataacatgtgctggagggaacagtaattttattgtcagtatggtaaagcttcgtatatttttctatttacttgtactgaattcttgatgttttcatgttagagatatatgaagtttaaccctgcaaaatgttatgcatgtggtaaatattattacagaactaggatattttggctgactggcttatccctcgttagaaatgaatactgcaaagctccatatctatgtagttaatcaagtcgcaatgcatctataccgtagagtgcaatttatcttactcctatatactctactcgcttcttcgtgtacgtaataagtaattttttagctttttagcatatctcactcttagaaaaaagtattttgattaaattaccttaattaaacttgcatattgttaacttgacatcttgaaataagaaaataaggaattttttatttaaaaataacattaatacttgttgataatatgaaaaccaaaataaaaagatttgtagctctattcagtgatcagtagccaaagaaagaaaggtcgaggaggtgaaaaaggtatagggtccttgagatctacaaaagttggtgaacagtgacatgcaatctaatttatttaggattaacatttcttttccaagtgaggaagcccatcagttgttagatggccccttgagatctacaaaatagattctttttgtgcaaaagataatattcattaattaaatgtatgcgtaccgagagagtggtgcgtagcttgcaccatattacaaagtactaaactattacttgtatcttctacagaataggtaacttatggttatcataggaattacttgtactttttttatgatagtgtaaatatttctttattatcgatgtataattataaactcgctcacaaattagtgaaataagatataacttatgggtacagagtcgtacttaacattgaaattgtaagatatacgattaatattttattaaatttcctacatcttttttcagtgctataggttgtcttagcaaggtagtcatgagggacaaaatattttagtgctaattagttttggttttaatctcttggggtcgtttggtagagaacaagttatcccgagattataatgatgaaaattataatacagaaattaaataatgatgagattatttagtgaatatatttttattggactaaaaatggggtacatgggtacatatttcatatatgctttacttagaaataagaaattatgaatgcttcaatttaatttgcaggttaacaacgcagggattggtggattaatggtagaaggagatgttgttataataaaagatttaatagaaggagacttcgtaaccatttctgctgaaaatggggtaagatatatagccaatgctaatatgttatcctaaattaattagaaacagtcaatggtgatctctttgataattttcagttattttatgtcacaaatacattcaaagaaatagtaacaaattgaagtaattattatgcaggaagaggatggtattaagaaatcaattgaaggtattgagcgtattgttacagattatgagttgacaaaacaatgcctggagacaaacttctatggtgcaaaaagaatgattgaagcatttattcccctccttcagctctctaactccccaagaattgttaatgtcgcttctttcttggggaagttaaaggtaatgaaatcataactgaatactatttcataatatatggaccctctgaattatgttgagtttaatttctacatacttataatagtggtagcaaatggcctgtttgggctgatcaagatagattgactcattgcccaattctgcctaaatggttaagataggctaaacacaacccatccaaattgacccaaatctttgcaatattttcaacttttaaacaagcattataaaatattcttacatatataataatatttttcgtaaatatcattttggaatggtttacgatgatgattttttttttctttttttcctgttacttgtcttatgttttgaaaaaatgttaatttatgcctaatgatttatttcctcaatttcgatttaaaactttatttgatagttccttatcgtataatactaacaaaaatcagaataataaaaaagtagtaaatcatgggttgatctgggctactgaaaataaatgggcttagttgggttgtgcccaaatttagcccatcactaaagtagcttatgtccaacccactaaaacctaacggattgggcgggtcaaatgggtttgtgcaacttttgccaccctaagtgatagtgtactcctaaccgttttccgctattctacagctattgtgcaaccaatgggctataggaatgctaagtgatgctaaaagcctgagagaagaaagggtggatgaagtgttgaatgaatttataaaagattttaaagagaaatcaatagaagccaaaggatggccaacttatttctcagcttacaaagtctcgaaagcatccctgattgcttacacaagggttttagctacgaaatatccaaattttcggataaattctgtgtgtcctggattttgcaaaacagacgtgaactgcaatactgggagcttaactgctgaagaaggtgctgaaagcttggtgaagcttgctttggtgccaaatgatggaccctctggtctcttcttttatagaaaggaggtcacctctttttga

SEQ ID NO: 37 - DNA, 1792 bp, Nicotiana tabacum
atgtcggtctttgcggttatttcattctttctacttctgttttttcttttcaaatcatatttgccctcatcgaaaacaaagaaaaattctccaccatctccttcaaagcttccgttaatcggtcacttccacaaactaggcttacaacctcaccgttctctacaaaaactatcaaatgaacatggtcccatgatgatgcttcaattcggtagcgtacctgtgcttatcgcttcatcagctgaagctgcttccgaaatcatgaaaacccaagatttgtcttttgcaaacaaacccatttcaaccattcctagcaagcttttcttcggcccaaaggacgttgccttcaccccatatggggattactggaggaatgccagaagcatttgcatgcttcagcttttgaacaacaaaagagtccagtcttttcgaaagataagggaagaagagacttctcttcttctccagaggattagggaatcgccaaattcagaagtcgatttaacggagctgttcgtttccatgactaacgacatagtttgcagggtggccttaggaaggaagtattgtgatggggaagaagggaggaaattcaagtctttgctgttagagtttgtggaattgttgggagtttttaacattggagattacatgccgtggcttgcatggatgaatcgtttcaatggtttgaatgccaaagtggataaagtggcgaaagagtttgatgcatttttggaggatgtgattgaggaacacggaggaaataagaaatcagacactgaagctgaaggggcagacttcgtggatatattattgcaggttcacaaagaaaacaaggctggttttcaagtcgaaatggatgcaatcaaagctattatcatggtatgtgtatatatatatcactggcattcaactttaaactttcattttactcattttactcttgatgagaagcatttataatcacataaatgtcatgtccccacaaaacatttaccccttaaacttctaagaacacaactttcaaaaaataaaatttttcataaatttcgtgtcgagtcaaactaagtcatgatctaatttgaaatggaaggagcatataattaccctctaaacgaacaaattaaactgaaagagaaaactatatattgtatttgatttacatgtgctaattaattgtttgatgcaggatatgtttgctgcgggaacagatacaacttccacgcttctagagtggacaatgaacgagctcttaagaaatccaaaaacattgaataagttgagagatgaggtgagacaagtgactcaagggaagacagaggtaacagaggatgacttagagaaaatgccgtatttaagagcagcagttaaggagagttccaggctacactctccagtgccacttctacctcgagaagcaattaaggatgcaaaggttttgggctacgatatagctgcagggactcaagtcctcgtttgtccatgggcaatctcaagagatccaaacctttgggaaaatccagaggagtttcaacctgaaagattcttggatacttccatagattacaaaggcttacatttcgagttaattccattcggtgcaggtcggaggggttgccctggcatcacatttgctaagtttgtgaatgagctagcattggcaagattaatgttccattttgatttctcgctaccaaaaggagttaagcatgaggatttggacgtggaggaagctgctggaattactgttagaaggaagttcccccttttagccgtcgccactccatgctcgtga

SEQ ID NO: 38 - DNA, 4497 bp, Nicotiana sp.
atgagtcaatcaatttctccattaatctgttctcactttgcgaaatttcagtcgaatatttggagatgcaatacttctcaactcagagttatacactcatcatatgcctcttttggagggagaagaaaagagagagtaagaagaatgaatcgagcaatggatctttcttcaagctctcgtcatttggcagattttccctcaacaatttggggtgaccattttctctcctacaattctgaaataacagtaagtcacaatcccatgcttatattctaccgtcaaacttctctataacaactccatttgttgcgatcgttttttattgttatagtgaagtgttgttatagagattatatattataatataacatagtaatcggttccgagaaaacttgattctttagtgaatgactgttatatggggatgttatagagaggtctgactgtgttacctaaatgaataatgaagatgttataattttattagagatggatgaagcatttaaacatgaaagattcaagctttaagattggtctttatcgtacttttgaaattatgagtttggaatttaatacttcctccgtctcaaaaaagaatgaatcttttactatatggggtcaaataagattttctttggccatattttttgcaaatgcatttcaaatattttgaatttttaattgttgtgacttacaataccttttatgcagtttctaaatgtgtaaaatatatttcaaaacatttaaagaatatatgttcatcacattaaaaaatattgaacttgactctcatgctccgacaaggtttaaataaattgaaacgaatggaatattactattttgtaaaaacttaggtaggttttcactatatatctaataatgtattcaaaactcataaataatgatcaaaaggagccttgtgaccgggaggtcacgggttcgagccgtggaaacaacctcttgcaaaaatgtaaggtaagactgcatacaatagactcttgtggtccgccccttctccggaccccgcacatagcggaagcttattgcactaggctgccctttttagtgattaacatatgtggatctaggatttaaattttttgggttcaacctttaaggatctgttacaattttagtagaatgttacacataaatttgtgctccgtgaatgtattgagtcagatgaacctggtattatacatgcggatacgctcctgatgctcaatttctgcctgcaggaaattactacccaagagaaaaatgaacatgaaatgctaaaagaaatagttcggaaaatgttggtagaaactccagataatagtacacaaaaactagtcttgattgacacaattcaaagattgggattagcatatcatttcaatgatgagattgaaaactccattcaaaacatctttaatttgtctcaaaatagtgaagatgacgatgaacacaacctttatgttgctgctcttcgttttcgacttgcgaggcaacaaggatattacatgtcttcaggtaccttacatttctgccctttcccgcacagcttcattttttttcgttgttaaaagacagttcggcgcataaaatatctcatgtatacgcagggtcaggacgaaccgcccccaaggggtgtaaagtatgcaacttaccctaatactaaatatctcgtgtatacacagggtcaggacaagtcgcacccaaggggtgtaatgtagacaacttatcctaatgctattagtaactgattttatggctcgaacacataaattataggtcacacagtaacaactttaccgttgctcaaagactcgccttcctctttttttagttatcgcaccttatttgtgcagagaatagcaagtttcgagatctgcttctatatagaagacttctgtattatacttttttattttgtccttctgcttaaaaatagtaaaaaactatagtgtggaaattgtaaatttcttaactagctgtgaaatcaaatagttattataggaatattatttaagactccacttatggaaaaccactgggttgttgttgttattgtcaataataacttggggtacgatttacttctttttccatggcttgtccacgactatatttctattaacaatgttgtgactatgctttctttgagtcgagggtctattgataacaggctctcgatctttacaaggtaaaagtaatgtctgcgtacacactctactccgcagactccacttgtaggatttcactgaatattttttgttgttgttgttgttgtaataacttagggtttaatttcttgatgctaatgaaattcatttctttcaaaatataaacatggtgttcaaccagatgtgttcaagcaattcactaaccatgacggaaaattcaaggaaaatcatactaatgatgttcaaggattattgagtttgtatgaagcagcacatatgagagtgcacgacgaggaaattctagaagaagctcttatctttaccacgactcatctcgagtccgtgatcccgaatttgagcaactcgcttaaggtacaagttactgaagccttaagccatcctattcgcaaagctataccaagggtgggagcaaggaaatacatacacatatatgaaaacattggaacacataatgatttacttttgaaatttgcaaagttggacttcaacatgttacaaaagcttcatcgaaaagagcttaacgagctaacaaggtacatctactattcttgtcatcttcataattatggtacaatcagacctctctataaaatacatcctttataacaacagttcactataacggtcaagttttctttaaaatcaatgttttatgttaccaaattattttgaaagaaatgtgactattatagagaggtttgactgtaactcgcgctaattaataacacctaaagtttaagtatgttaatgctgttatgatatctatagctggtggaaagatttggatcgtgcaaacaaatttccatatgcaaaggacagattagtagaagcttacttttggacggtgggaatatattttgaacctcaatatagtcgttcaagaagtttggtaacaaaagtagtcaaaatgaactccattattgatgacacttatgatgcttatgcaacttttgatgagcttgtgcttttcacggatgcgatccaaaggtaaaattatatataataaaatctttctataacaacgtcatttattctgatatttttttaagatgctatagtgaagtattgttatatagaaatatattatgacaacttagactttgcagatgggacgaaggtgccatggatttattaccgacatatctgagacctatttatcaaggccttctcgacgttttcaatgaaatggaagaagtattggccaaagaaggtaaagcagatcacatctactatgcgaaaaaagaggtaatccttgattaagttacattaattactacttaatagttaattaagtaaaccaagttgtagggaagaatcgcaattttgaactattagtacattttctgttacttttttagatgaaaaaggtggcggaagtctattttaaggaagctgaatggttgaatgctaactacattccaaaatgcgaggagtatatgaaaaatggacttgtaagctctaccggtccgatgtatggaataatttctttggttgttatggaggaaattataacaaaagaggcttttgaatggttgacaaatgaacctttgattcttcgagctgcatcaacaatttgtagattaatggatgatatggctgatcatgaagtaagtataacaatataattttcattttatataacaatagccatcgtaattcgcgaattttgtccctaaatacaatacaaaaacaactacaataacaaaaacaacatatccaatatattcctacagtacgggtctaggaagagagatgtgtacgcagatcttaccctaccttatagaggtagaaatgttgttcccgatagaccctcgactcaaaaaaagcatttctcagtctgatttcgagtctaggtggcacttttgcatgataaaataaatagacatgcttgataaattacaacttcaatgatcacatttacttaaactgaattatggaactttagaaacggctgattaaaatggtaaaatattgtataatattaatgaagaaattgaaatatattatgttgtaggttgaacaacaaagaggacatgttgcttcatttgttgagtgctacatgaaagaatatggagtttcaaagcaagaagcatatgttgagatgcggaaaaaaatcacaaatgcgtggaaagatataaataaggaactcttgcgccctactgcagtaccaatgtttatcctcgaacgatctttaaatttttcaagattggccgatacatttttgaaagatgatgatggatacacaaatcccaaatccaaagttaaagacttgattgcttcgttgtttgtcgaatctgtcgacatatga

SEQ ID NO: 39 - DNA, 2026 bp, Nicotiana sp.
atgtcttgtcaatattacttaaccacgacgacctcttctctcagaatattctccttcaccccccgccgttacgcaccgaattcttctgcaagtcaacctcatgagttctttaaaagtgagctctagttttactactctatctccttcttctttttcttaatattaattgttgttcttttttctttggggtaggggttagctttgcttttattaaacctcgcctccacctccacccccacccccatcatttttttgtatcgctttggtttatgaaggtttaactttcacattgatgcattactgaaaaaaccatgcatcctgtatattattgtccttagaatactagtatatagggtcgatttttcaactgagaattactagaagtactattgttagaaaaaatattggaagtttaagtacaaaacaattacttacagccaacgggtgttctacagaacaagtacttttcagttccaatctgcaatgcaatgcggtttcaagacctcgcgcacaaggtatcgactagatttttttccctttctttttgatctgtatttttattttattttttgacaaaaacaatgacaatattgatttgttaaaaaataaaaacgtagaatacaaagaggtgtttaaaaatggtttggcagttatcaagcgggacgacaacgtggaagaagtagacagtgcagaagaacaacaagaagaagaagaaacacaagaggtggttcggccaataaagaaaatctctttttcccttaagtctaaattatgacgagccaaaactttattaaagagattcaagaaaatactaaaatatcataagtggaatgtgaatctgtgacatatataacgcaatccctttaccgctacactagtatattctcttatgacaaagagattcactccctccgtttcaatttatgtgaagttatttcctttttgatctatgccaaaaataatgatcccttttcttatttggaaacaatttacttttatgcaatgatttatagccacacaaaatatatatgtgcctcattttacaccacaaattcaaaagtcttctctcttttcttaaactccgtgctcagtcaaataagctcacataaattaaaacggagggagtaaaaaagaatagcttatgagttatttgcatcgtgcttaatttttccacgaaggattccattgaatcgcctttactgcacctaattcctcccctatatatatatatattcttttacactagctagatacagtatttcacctatgagatactgcatctaactatctataaaaagtgagattcacaatatgaaaaataaaacttagttacctgctacaatatattaaaatacatatatatgacataaaaattatttacgctttcataagtacgtttaattacattctattttgagtacacatattcttgaatgtctttgtttataatcggaaaatgatgttacgtaaaaggtgtacagatcaaataagataaagcaacatatttatgccgtccggttaatgttgcaaagtatggatgatggagagataagtatatcagcttatgacacagcttgggttgctcttgtgaaagacattaatggaagcgatactcctcaattcccttcaagtcttgaatggattgccaacaatcaacttgctgaatgttcgtggggtgacaagtccatctttttggctcacgatcgaatcatcaacacattggcctgtgttattgctttgaaatcttggaatttgcacattgacaaaagagaactaggtaatgatgtcactgcttactactttatgttatcattcatcattatttgattatatatatagtactttcttttgtttttggataggaatgtcgtttatcagagagaatttaagcaagattggagatgaaaatgctgtgcatatgccaataggatttgaagtggcgtttccttcactaattgagattggaaaaaagataggcattgatattccggatgattctcatgtcttgagagagatatatacctga

SEQ ID NO: 40 - DNA, 9030 bp, Nicotiana sp.
atggcgtctatcaccataaaccattcattttcccgtaaccctaacatctcattccatccccaaaatcctctcattcaaacccaagctctcttcaatttcaaaccatcaatctccaaatgttcccctattatccactgcgcaatccgccgtcgacccgaatataccccgagccacattcccgacccgaactacattcgcatcttcgacaccactctccgcgacggcgaacaatccccaggcgccacaatgaccacaaaagaaaaactcgacgttgcgcgtcagttagctaagcttggtgttgacataattgaagccggttttcctgcttcttctgaagctgatctcgaagctgtgaaattaatagcgaaggaagttggaaatggtgtgaatgaagagggacatgttccggtaatttgtggacttgcgaggtgtaataagagggatattgataaggcttgggaggctgtgaagtatgcgaaaaaaccgaggattcatacgtttattgcgactagtgagatacatatgaagtttaagttgaagatgagtagagatgaagttgtggagaaagctaggagtatggttgcttatgctaggagtattggttgtgaggatgttgaatttagcccagaagatgctggaaggtttgcactttacacttccattttgaactttatcgaaaaatttaatgttattcaacttttcaggtattaaaaatataaactttgatgtgataatgtccctgttacactaacttactttttaaccattactttaatatttttttcgatgtcagtagtataatatacatttagtaagaatatttcatcaattaacatttaactttgggctatcatttcactaaatataaccacatccctgctagaattgttgattctgagggttttttcgtgaagcgatccttattgaattcaggcaatccaggaatttgccaatctttttttgttgataaagtaatcaaattttattaaaaaatagcaaatatcttcccatttacatgaagtatgcccaaaagtagaaagctttcaaaataatatgattttctagcaacaacacgcaatcatctatgcttatagggatctcgcggtgtgcaccaaaaagaaataagcttataagatgctattttcttatttctcttgtggatgagtcatggccattatggtcttatagttgaatagacagttttatgcttaaagatagtgttatatagattcagatatttacataaaaatgattaacattttagctggtgaatgatccttcagaattctgtaaagtttctggagatgatcttgtcacaaggctattgacactaaactggcttttaatgaactcgcttgttcacttcattcttctctactagcgtgtgtaagagcgtgaaatttatgctctgttaagttgccttttcctattaaggagttgtctggtatgatgctttgagatctcaagtaagaggtttaaactacctactattttctattgtcatgtataaaagctcgtggactagttaagtgattagaattggcaatggtaaccactttcatgcattctgtagcttggatttgttgccgtcattgtattttgaactgagccttatttcctgtttattcctctcagatccgatccagagttcctctatcatatccttggagaggtcatcaaagctggggcaacaacccttaacatccctgatactgttggatacactgttcccagcgaatttggaaaattgattgctgatataaaggccaataccccaggaattggagatgtgatcatctcaacacactgccagaacgatcttgggctttctactgccaacaccttagctgtatgtagttcaatgttgtttagaacctagtggtttataccaacttataagctgtatgttcattaaagcgtgttcaatttcagggagcatgcgcaggtgcaagacaagtagaagtgaccatcaacggaatcggtgaaagagctggaaatgcttctttggaggaggtatgtgagggttcttcagtgagaaacttcagctctcttatgtgcatgatttgagctccaaaatttgaggggtggtaagaggtggaatcaccaagtatacaaccggactatgagttcccctctattctttctccgtcataaagatgggtctttaaaatattttcccatagcactgtaaggtattctctgcacaaaaggaactattctacctcttccgaaacaaaattaacatcttgactttaaactgatatttttcttttcgagaaaggtaacaatgtattatcatcagcacagcactatatttacagttcaaaaacagcaaaaatgctcttgttcatcttacaaggactctattaactcaagtaaggctgagcatcttccaaatatctctctttgcacaaaaagtgaaacaaaagtatacaattcatcttgattttaagagtagaaattgtgtattatctaaccttccttagaggatcttgtgggagccacatgttattatttttgtttttaggaataaaatcaagaaaaaagggtgttgagaatggtagaagtgagtacatccaaccttctgaatttgtaagatatgtttaaacttattttaaggacatcattttttggggtgacgcggaaaagaagggttgagtaaggacttcatatttaagaattaagacggggaagactttctttttgaccatatcctctgtagcctttagacgcattggtccataggtgtgacactatgatgattgaaggtgataaaagcagaaaaagtagaccttaagtcacttagaaggaagttatatcgaaagtcctccaatctcacggattcagtttgactagctatgaaataatacaactataaataaaggatctatataggcaatatctagtttgatttaatgtttaactgttattattacactcccttaaagtagttttttctcgatcattttttttttctggttaaaaggcttgtatgtccctgtagagataaatgtgaaacgtagacacctctggttttagataaacctactttgtgttaaaagtcaaagattgaacaaagtgaatgggtatagtagattcatatggctgaacccaactaatttgggattgaggcatagttgcttgatgatttccttttgttgaagttagtatctcctatgcctcacatttggttgcctttccactttggattgactattttccacaattaaaattttgccactcacttctacggtgcacaagttttctacttttcttctctgaggctaagaaaagagcaaactttatagtgactacagattttcatatatccttttaaaaactatttaatgtcacagcgagacatccaattttggatgaaggatggaatttcatgtgctatcatagtatttctctccctctctttccctatgttagctttttcactattatttattaggtgtggttttacttaccctttatggctcgatcgaccatctatgtttctaactatttgaaaacaatagttgcaaatttgcaaccatattttgaagcaaatttctgctgttggttgtgatatgttctgttgaaacggacaactactgacttgtatgggattcttttgtcctctgtgttgcttgttctgtttgcttttcctcttgggcattttgggctttcattttctaacctgttaccttcgacaatgccggaataggttgtaatggccttaaaatgtcgtggagagcaagtactaggtggcctgtatacaggaattaatacacaacatatactcatgtcaagcaagatggtttgtcccctgctatttcatagtctctgccgatattttactggttaatatctttctgatgtgccttctgctgaccctttgctatgcaggtagaggagtacaccgggcttcatgtgcagccacacaaggccattgttggagctaatgcgtttgctcatgaaagtggcatccatcaggtctgcgtaattttgctctaattcattgttgaaagagacaaatgttctaaaccctaaacagttcttgaaagaggcaactcaatcctcttattagttcatgggcatatttgcttgaatgtttgttaatttttgctttattctgctttgactaagcacaaaattttgctatttaagttgaaaatagatactctattcatccaattagttctgtaacttgtattaccttgctttgagcaaagacttttttttttgcactattccatcgggtactgggtaagaacaaaagactttttttgcacaaatcctataaacagtacaatcatccgcagaggaagaaaacaagtgagcatgaactatattatcttttaacttcgcgtcaaaataacagatatttcagaataggtctggttctggttactagtttgctgaatctgacatctacaaaagcataatatgggagctgttttaagagtaatttgccgatatacactgaaatagtgagttgatgcaagagatttaagagaatgaagtagagggagagaaggagaacggaagaagggaaagggattattagatgcttgtgaaattgtttcattaagagctgctgaaagctcaaggatacacaatattctttttattggctcagtgacatgtctaaaaatttgggacaatgtgaagggtatagctttctttgctggtatgtcacagcttttcagttactgtcactgaaaagttggctctgttagcatgaagggttgttctccaagttttaagcaacaactcacagccaatagaaatacttttaaattaaacagaagcctcaaagtaccaaaaaaccactagaaagtagctccaagtattccttcttggggcattagatcattgtagacattggtgagcatattccaggaggggcagagatcttatacctcctgacataaaatagcttctttcaagagtttgaatccacttactctttcatttttcagattatccatttgcttttggcccttttcactttagttgcgtagttattattcctatatttggatatctatgaataaatctgccacatatctggttagagattgattagttgttctgtttgcactgtttttgattcatcttgaactgcataaagtgtttcagttaaacatctttagtgtctccccctcccttttcttccttgcgtcaaagctggattctctacctttttattattgtatggttgtgaagtttaattaattcagtttttctttttcaaactcttctgcttaaactactttgtgctctctaggatggaatgttaaaacacaaagatacatatgagattatatctcctgaagatattgggcttaaccgagttaatgaatctggcatcgtccttgggaaactcaggtatgtgattttccaatcaatgcttgttgctatgatggcataaatgttagatttctgtgctcttcgagcttttgcttattatccgttgattattaaacttgcttagatttactacatcctttttgttgctatgaaggatatatttctttagtactttagtaaggctccctgatcaacatgctgttgctgtttcaataatgaatcgcatctttgttgttttaaaatactgtagaggtctttaggaacttcctctcttctcatggagggatgaagtagaagaagcttattgagtttgcctcactataaaatgtcagagccaccattgcatcagataatatcatcacagtctgtacctttgtccctcctatgcctccctccgaacctgcactattcatcatttaaatctaattgcttcattcctataagaaattgatatgttgaacatttttgtgtagtgggcgtcatgctttgcaagccaaaatgctcgaggtaaattgtatgccctggacttgagtttctttcttatatttaagagcatgaaacaaatcctttaatcctgatgcagcttggatacgatattgagggaaaagaacttgaggacctcttttggcgattcaaatctgtggccgagaagaaaaaggtgaattacgttgttgaaatttccattgttgtacatatatttacattgtcattcaaatgcacgtggaaatgccctgtggtgcagtttattaattttgcgatgttgagaagcttttttttttttggggggggggggggggggggttgatgggtggaacattttctccttcatagattgaccttgtggatagaacacggactaaacatgtaattatgatcccccccccccctctctctctctcttagtaatcgatcttacatttaccaagtatgtcacaactcacatctttttgagcaagacgaagtatgttgcatattctaattttatttgttgtagtgttttccttatctctgtgtcggggttgtataatcactcgtgtgaaactggaaacaactgggtgtgtaagtacttctaaaatgttgtaaggtgagacgaattaagtatgagaaaaggtggaattgagagagagagagagagagagatgaagaaaatggagggtggatgtgaatgaaaaagtcggtggtaaaaatcttagaaatgacacctgaaaattggtatggtccaactccatgttggttataagctgaagtgtaaaaattttcctattatacctggtatattataaaatacccctcttctcgagctggggttactgacaaattagtgctaggaccttttaaatcatcttttccttgtgcaaactttcttctgctcatttgaaagggttatctggctaacttttatcagttcaattattgaaactaaggttaagctactgtgtggatctagtatgatgttggtatcgtgggtatgttttttgaccatctacttatctcctactgctcattcagaaaattacagatgatgacctgatagcattaatgtcagatgaagttttccagcctcaatttgtttggcaacttgaaaatgtacaggtaaatgtcattgttgactacatttacatcggttttatttaattttctgacttagatctggattgggaatgatagttcagctgatcaaaagagttcctgttcgatggacaggttacatgtggaagtcttggcctttctacggcaactgttaagctcattgacgctgatggtcaagagcatgtttcttgttctgttggaacggggccagttgatgcggcttataaggcagttgatctcattgtaaaggtctgaaatagaaatcgaatttcctaataatcttgtcattaggactcgttgattgcaagctgatctgttggttaatgttcaattttgaaatgctcattcggtagaatctctcttttatgcaaatcatcaaaattatacagatactgattttgtgttctcccctggctatatatgcgtcaggttggatatttgttgagcaaagtattcgaaagcacatgattttggatttaatgtcttgttgagtcctcttacatgtatcctttttgtcatcatctgttctacagaaaaaaatgccttcttttctgaccgttctcttgttgtgaaagaggtcaggtcagcccaagtatatggagttgtacttaaaaactatgactagagttccatttcaaaattaataaccacatatgaagtcctttcttaaagctagtccaaccctaactcagcatccagcagaccagcactgaattcaacaatgacatacagacggccaaattccgcgtaacaagtgccttctattttactctaatgcattgtgaagaacctatcgagagccatttcatcatgttccacataaatgatcaacctactggctttataatagtttctaaaaatacgtgaaactgtgttaaataaccattttgagtgaaaaatctacattttgaacttgtcttacaagcagatttggctctaggagatggtatttggctctaaagcagtagtcaatttttggttttcagttattcatctttttttactgtttgtgggctcttttatgaatgtagtgttcacccattatgcaggtacctgtagcactccttgaatattccttgaatgcagtcacggaaggtatagatgccatagcttcaaccagagttttaattcgtggggagaatggccatacatcaacccatgctttaactggagagactgtacaccgttcttttaggtatgaaatgtaccggccatgttgtttcatctaatcttatttgccatctttctttgatagaacataggaaatacggagggtgtgttggtgaattttggaatcaaggacatgacacggaagtgaaatgagccaaagtgatatgttttttctataaagctaactatgcataacccagatttagggctaacacatgaatagaaaaatgctgtatgagaactatgatcgatagcagacgtggatatttaaatggaagatatttgcatagcatgaatatatcagctgaagcatagccatagtagacatcagattcatgtttctgccactgcaacatctctcccctcctcttcggaaatactgctcccaacagttatccctgtacccccaggtcctttctccaatctttatttcgtcatttgacttatccagagggaagacctgtgtcagtgtatccagcaagttggggagttaaacttcatagtagaccgacatgattggctggatgtcaaacatgtacccggcatattttcgacctacatatagctaatgcacatacattatgttttctggcgagtccgtaaattattgttttttaccgtaaattattgttttttcttttctcctattagaaatgtcttatacgagttgtaaattctggcttccagtacagactctgtgctgatgatttgattgatatttgggatatgttgctttctcaaccaaaaaagtcttatatgtctactctcttcttccacagtggaaccggagcagatatggatattgttatctccagtgtccgagcctatattggtgcattgaataagatgttgagtttcagaaagctggtatcgaaacacagcaaacctgaaggcagtgcagtcgtatag

SEQ ID NO: 41 - DNA, 6991 bp, Nicotiana sp.
atggcgattttgatatcaagatcaagaaactttaaccattttcttctaagcacaaggtttcgtttcttatcactcctaaaccaaacaagttcagaaacatttttccgccatgccaaaacttcatcatttacaactgcagccggcggtggttttacaaagtcgacggcggcattttccggcgagtctgccgccgttttccggttagaacgtttccagtccaataaagctggagagcaactaaatacactctactatgaagaagatgaaaatcaccaaattagttatgaaaatcaggtaagatattcctccagctggtacttgttttttttttccttctaattttccgccttctcccactctgtttaaaattcttgttaaatcaaactatgtcacgtagattaaaatggatggagtttaatttttttaatataaaatacggtggatgaataagttatactctaatatcaatatatataatcgaaataaagaaattggacataaaggttttctaacgatagacctcagcgcaaagtgcatgaaaagggataaattcaaaaacaaataatagaaattttcagaaaccaatactactccttagtcttttaacttcctatagctacatatacataattactttttacacctactaaacaattattatgatagtgtatttactgtatttgtattgttgtattcatgaatacagcagtaaaaagtgcctaaaaattagggtaatctagatgtacgtgcatgtattccaacaaagagaaattttcagaaaccactattgtttagtgtctattaacttcttatagctacatatacataattactttctatagctactattcagttgttacggtagtgtattcgttgtattcgcgctgctgtattcatgaatacagaagcaaaaagtacctaaaaatcaaggtagtccagctgtgcgcgcatgtatttacatgtatttgcgtcacgtattcataaatacagcagcaaaaagcgcctaaaattagggcagtccagttatacgcgcatgtattcacatgtattcgcgctactgtattcatgaatacaacagttaaaagcacctaaaatcagggcagcccagctgtacgcgcatgtattcacatgtattcatgaatacaacagcaaaaagcgcctaaaatcatgtagtccagctgtacgcgcatgaatacaacagtaaaaagcgcctaaaatcagggtagtccagttgtacgcgcatgtattcgcgacatatattcatgaatacactaacggcaatcaccttaaaataggtatgtccagttgtctaagaaagaggaaaaacataaatagcgtatttcatgccttattttatgtctcaatggtagtatatatcataaatactgattttgttataaaatataaaagataaatatagaaaataatattttaaaataattttgatttataattaatagggcgtatacttttgatataggatgtggtaaaatttccaacaaataattgaactgaaacctatctgaacactgaaccggcccacaacaaattagctagttgatttctttcttttatattcgtttatactctcatcatgtgataacacagaattacaattttttgtagaatttattgcaaaatgtaatctatttattaggaatatcttcatccttttatgtctttgattatgacaaggttcaatcacgtcctatgttggttgattacataatatatatgtgttcgattatgcatttgctagatcgtcgttttgcacgattgttttattgatttgattatatttccgtatcctatttgtagtgatagttaacctcactaattaagtgactaattatatattattcatatctttgaattatcttattcactcattgttgtttgcataccatgatcatatattttattcatgtttaaaccttaaaaattgtttcgtaatactttgcttaaaaattttaaataaataaataaattttaatttcgaactcaaaatcaaatcaacatcaaaaaaaaaaattgtcccgctcctgctgatcattaagttcagtcgatcatgcctaagagaacaaattgcataatatatatatatatatatatatatatatatatatatatatatatatatatatatatatatatatatatatatatatatatatatatatatatatatatatgaaaattctccttatattcttccttattcaacttcaaaataaaagcatctgttttaattttaattgctcttttgtcccgtcttatattagttgcctcggctttttgcagtgttcaagaaaaatggctcaaatcagatatataaaaccattaattaagcacgttttgcaattgagctattatcatttatatcttgatgatcacgtgatacttttttttttttttggaggataactataggatttcctcgagcttctagacgctttaattttgataaaagtgatgactcaccttaacgtgttccattttgaaacatctcaaatcatcccatttcaattctcctgttaaatccgtcaaagaagaaaggaagaaaaaaaaggtctggcctttatccaagaaaaataaataaaaccaaaaatatgtatatttgctaaggtttaagcgtgatattcaagtatttttattttaataactaactactacacttacaagtagaagatttgatacaaataagctaatactttttcgcctctcattgaaattttagaatcattagatgcttgtatttgttatactataaaccaaaaaaaaaaatgttaaagcgatatataatagtaccaaacttgaacaatcgtgacgtcttaataaaattttattctaatgttgtaaatagttcaaccattaaattagggggtgaagccacaatgaggaggaggagatcatattcttcttgcgttacttatgttttttgctcaatttttggcgaagtgcacaactagtcatttttaagcatgttatttaaaatatattcataatttataatgtatttaaatattagccaattcactcaaatttcaaaatatttaaaatatattcataatttacaatatatttaaagattaacaaattcactcaaacttcaggacatcttaattcttaatacacatagatattcttaatacacattttaatattcagatgtgtattcaaatttagatatattaattttaatacacatcttgatattcagatgtgtatttatattcagacgttttaatcttaaaaaataaatgaggcttaaataaagcttaaagcatttatttcaaatacaacctcaaatttagtagtggtgtagtgctattccagttttattgagattgagtagtatggatttgtcctagggttgaagaatcaagccaaggagagaggtctagggttaaaactttcgagatggagagaacttttgatggtgcatatttttgcttttaattaatcttatgcgatttaaatttaaattaggtaaatcagtaaatttctagtaacggataattaagcaaaaaacaagacgaggagagaagtgggaaaaaaaatagatggggccaaatgaccacgcaatcaattggactaatacaatactctaaaaattggttgggtgggccatttagaatgacatgacatggatggacgttacgtcaattttgagtggaaaaataattgattttctaaaaggataaacactttctgacgtgagtggtaaatggatagccacaagccttaaatcaatgaactcagtttaaggaaaatatggggtaagaaagaaaaagaaagcgcagaattggatctaaagaatttggttaatggactgtaattcagaagtaattttttcgttaggttagaatttataaaatcaattttatctatctacaatttattcagttgtcagtttgttaggtaagatataatgaattcgtttaaatgtacacaatttattcatttctcaatctttaagaattatgtagtaggtagcacctcttcctcttttcctactcgcgatcaatgcggtattaaatcttatgtctttttaactccaataataataataatggttgtatagaaaattaacataaaagcattaatttggactgagtctttaattctttatacgtatatactctattgttcttctaactatgagcagaaacatggttaaacctatgttaagaatagctgattcagatcccattattaattggaactacttgattgagtttgtatagaaatgattatggtctagaaaatgatggaattgaagaacgagttgattgggtttgtttaataatgggggtccaagattcatgtctagccggccacgtgtacctctagtctctagatgcaagcagatgatgttacacttaacactacaagacagaactttatttagtactcttgtcagttgattgatgtttttttaataattgatttcattactcaaactgcattgatttgattaatttgcgattaaagaggagcgcttatcaatattaattcgagatctctaattaaatattagtactaatttgtttcataaaattgaaacttgtaattaagacttagtcatccgggccactcgttggtggtagtgttacttcccctgtctgtctcattttgtagtaagttggctatcatgtaaaatgacaaaacaagttccttcttctactgtcttattaactcgtcaaatattcttgataaatagagcttcaagaaaacttagaagaatttacttgacatgatattatgggattccttagaatcctcttctctaattctaggctaatccatagaattggtagtaaacaattccatgcctcccctggtgcacttgttggttcttcaacaattcaccgttttgagtcaaccaacacactgaaagtgcaatcttctctctttacagaaaatgatgatgattattttcaggttattttcacttattcaccaagttctattcactgatacttatttagacagttttgaatttgcttggtattactgaatattggcaggtgatggatttccctggaggacagcttccaattactcctcaaatgaaatttattgcagagtcttctgaaaagaggttaccttgttatagagtccttgatgatgatggctatccaattccaggcagcatttttgaggaggtatttgcaattctttcatcaactgtagttagaatatccatttctatgaattttgatgtatttccttgatgtaaaatgtggtaggtgagcaaagaactggcagttaagatgtatagttcaatggtggcacttcaagttatggataccattttttatgaagcacaaaggcaggggaggttatccttctatctcactactgctggagaagaaggtatcaacatagcatctgctgctgctctcaccctggatgacttcgtcttgcctcaggtactcgcttttattcataggccaacatctaaagtttatcattttataactttgagttcagttgaatacatttagcattagcacaatgattgaaccatagataccaatgtcttttaataatagttttatgatcctataaataaccttggaaatgatgtaatttaacatgttattatccatcacagtacagggaagtaggtgttatcgtatggcggggcttccccctgaaagagattgccaatcaattgttcggaaacaagtttgattatgcaaaaggaaggcaaatgccatgccaccatggttctaacgagctcaattacttaactatttcttcgccaatagcgtaagatttcaaagatttttttagcatttcctttctcccctttctctaaagattcaggatattcgatctaaaacaattttctgctccaaattccatttacctcaggacacagattcctcaggccgctggcgttgcttactctctgaaaatggataaaaaggaggcttgtgctgttacttatcttggagatggtagcactagtgaggtgattaaattaacgcagtttttaggagttttataatctaatggaattattagctgactttctcttgatatatttgcagggtgattttcatgctgctttaaactttgcagcggttttggacgctcctgttgtatttatatgccgcaacaatggatgggccattagcactcctgtaaacgaacaatttcgaagtaattttccaaactcatttgatacaaaatgcaccctttactagtgcaattttctccatcgtaaacatagttttctcctatgtgtcataatggcaggtgatggagtcgcctcaaaggggcaagcctatggaattagaagccttcgtgtagatggcaatgatgtcttggcaacttatagtgctattcgtgcagctcgcgaaatggcaattaaggaacaaaagccaatattagtagaggtgaagtgttgctccttcataaagaccaatttctgttcaagttacatgacatgttatgatatctgcactgaatcttgaaattgttaatatagaaactttcatactaaaaacttccaacttttgtgtaacttttaggccatgacttatagagtagcccaccattcaacatctgatgattcaaccaagtatcgacccgtcgaagaaatagagcactggaaaacagcaaaaagcccaatatacagattcagaaaatggattcagagaaatggttggtggaatgatgaaaatgaatctgaacttcgcagagacgccagaaaacaggttaaaatttcaagaatcatatatagcaaaacttgaatgatattcttctaatatactatgctagtaacaagtttaaaatggttcttaattaggtattgcaagcaatgcaagcagcagagaaggtggagaaacctccattgacagatttgtttacggatgtttatgacaaagtgccattaaatcttcaagagcaacagaagtttacaagagatgctgtaaagagatctccaaaagaatatccttctgatgttcctgtttaa

SEQ ID NO: 42 - DNA, 16227 bp, Nicotiana sp.
atggcgattttgatatcaagatcaagaaactttaaccattttcttctaagcacaaggtttcgtttcttatcacgcctaaaccaaacaagttcaaaaacattttcccaccatgccaaaacttcatcatttacaactgcagccggcggtggttttacaaagccgacggcgacattttccggcgagtctgccgccgttttccgggtagaacgtttccagtccaataaaactggagagcaactaaatacactctactatgaagaagataaccatcaccaaattattgatgaaaatcaggtaaattttttcaacacattcttcagctagctagtactttaatttgtttgttttttttccttctaaattttcgtcttcttcttatcatgtttaaaatttgtatcaaatcaaagtatttgtaattaagggagtataaattataatataaaaaattatggtgggtgaataagttatactccagtatcaatctatagacgaaattaagaaattggacataaagttttctaaggatagacctgaaagcaatggtaataactcactttaatttattatacggaaaagggtcaaaaatgattgaaaatggctcaaatacatcctccttccccctattggtccataaatatccttaacgttaattttcggactaaaactgcccctccttttaacagaactatggcatggcatatgtggggctttgtattaaatatgtggcactggtttattggtacacatggagatattagacccaacataaataacccaacaaccaaaccctctcgagaaaagttcatcttcctcaaaaccaaatcctctttctctgaaaaacaacacgcaaaaggtgatggagacttttcatggatgtctatgggttcaaggggatttctttctctgctaacttggttttaaggagatgataaagatttttttattgctattaatggtgaatctttatccatttttgtggcttccaagcactgcttccccccattttttcctccgttacatcgtttatataacaaatttacgaatacatataccggagaaaaattcatgaatagatacgagagatcaaatgtttaatactatgaatgagcaaataaattattgaatttaacttacacttgattttcactcaatctagtgagggtctccatattaagggttgtcagcctctcactatttttttgggatattccaataatcaaaagatacatcgctataagaatcagagactaagttgaagcatctgtcatttatcaacaacaaaaaatataatcagttcaaacaaaagaaaaaaaggaaagagaagaaaactataaaaattaaagaggatgtaactctaagttctcctaaaccatgcctttctctcttttaccgtgcaagagaatttcaaccttctgtgacaatggcttccaatcttcagatggaaagtaggtttgagataaaaggttccgggtttgaggttactctaaatgggtcgggttatctgtgttgggtctgatttatgtgtatcaataaaccagtgccacatatttaatacaaagccccacatatgccatgtcatagttctgtcagaaggaggggcagttttagtccgaaaattaacgttaagaatatttatggaccaataggtggaaggagggcatatttgagctatttccaataggttaagggtcatttttgacctttttccatttattatataatcataataataataataataataatttctgcgccttctagccaaaaaaaaaaaacgtgcatgaaaagggataaataccaaaacaaataattggactacagcctgtctgtacgctgaacccacaacaacatttgttgatttcctttatattcatttaatatactcccatcatgtgataactatatgacacagaattacagttttggtagaatttttgcaaaatctaatctatttactaggaatattttcatctttttatgtctttgatctatgacaaggttcaatgaaatcacgtcctatgttggttaattaattacataatatattatgtgttaattaatatattatgataagaggagttgctctgatggtagcaacccccacttccaatcgagaggttgtgagttcgagtctccccaagagcaaggtaggaagttcttggagggaaggatgccgggggtttattattcttggatagctaacctcagcaattaagtgactaattattcgttatattttggattatcttcttcgtttattgttggtttcatatcatgaatatatattctattcatgtttataacttaaaaattatttcatactacatactttacatataatattaaataagtaaatttcattttcgaaacaaatgacatacatggctaaaaatcaaatcaaaatttttaaatttaacctcgcatgctgaacttcatcattaatttcagccgatcgcgcgcctaagagaacaaatagcatagcatatggatatataaaaaattatcctaatattcttacttattcaaattcaataggagtaaataaaagcatctgttttaattggtcttttgtcctattttatattagttgctacggctaatttttgcagtgttcaaaataaataagcttaaattcagaatataaaaccattagttaagcacgttctttaattgagttattatcatatatatatatatatatattcttgatcacatgcatgatacttagttttcattttttggaggataactataggatttcctcaaatatgcttctagacgcttttgacataagtgatgactcaccataacgtgttccattttgaaacattttaaatcatctcatttttcaattcttctgttaaatctgtgaaagaagcacgctaatagcctgtttggccaagcttatttttggtgaaaagtgtttttttttttatgccaaaaatatttttggccaaaaattaaagtgtttggccaagcttctggaaggaaaaaaaatattttcgaggagaagtagaagcagaaaaagtagcttctctccgatagcacttttttgagaagcacttttgagaaaaatacacttagaaacaattttttaaagtttggccaaacactaattgctgctcagaagtgcttttcaaactaattagtcaaacacaaactacttctcaccaaaagtacttttgaaaaaaatacttctcaaaataagctgatttttgcagtttggccaaacggactataaaatagaacagaaggaggacaaaagattgtcctttatcaaataaaaataaaagaaaacaaaattagtatatttgctaatgtttaagcgtgataattaagtactataataaattactagtacacttacaagtaggggtgtttaaaccgatatcaaactaacccgattaaaaaatccaactaggtttagtttaatttggtttgattttgagtaaaaaaaaaacgaaccaaccgacttataaatatataatttttatatatactttaaagattttatatagaattttttttagaaaataactaaaaatatttgggactctctcatgggatctagtttttattagaacaatgaagtgcatccatagttagttatgttaaataatgagttgtgtatcatcactttcttatcaagtatcattgaaatacatcaatccctttttcatattcatatgtcaaaatattcttatacttttttcgaatttgaaatggtagttcgataattttaaaattaaatagaacatactattatttaggttttcatattgatattatgcttaattattaaatgcgattaaccttaaaagcataaattaatgaaaaattattgttagacgactaaaataactaccatgtgttactacaaaagtctcacataagaatattttaatagttatcagttttttcaatttttactaatcatatattcacttatcaaaactttatttattactttaatttagtgaagtaatattgaaataatattcatgtaacaaaaaatcaaaaaccccgaaaaaactaacaaaaccgaaccaattcaaaccgatatagttttttttgcatgcctctataggaattgtaaggtaaggtccatgccccccttacatgtactcttcctttgtggttttcttgttttattattaataaaaaactactatgctggcctagtagtataatttgcccaaaaaaaaagttttattctaatgttgaaatagttcaaccattaagttagggggtgaagcacaatgaggaggaggagatcatattcttcttgcgttacttatataacataatctattgtttggttctacacgtaaagaagtattacaaatatattgtctcctttctgccttctttaaacattaagcgtggtgatgatgtttaaaagaatattaattaaaaatctaggagcattcccttttttagataaatttgttattctaagtaaatgaaggttaagcatttatttcaaatacagccttaaatttagagtggtgtagtgctattccaattttattgagattgagtactatggatatgtcatggggttgaagaatcaagccaaggagagaggtctagggttcgactttgtgatagagcatgttatttcttctattaaccttatggtttaaatttaaattaatcgaatcaataaattttaagtaatgacagataattaattaacccaaatagcacccacctaagtttttaaatttaaaatagttgacgaatatataatatatgtaaaatttatgtataattaatatataatctatgtatcccgtttagaaaaagtaaatagtaaatttaaccgactatttgtgtaacaatccgggtaaactaaaaaaaaaaaaaagagccaaatgaaccacgcaatcaattggattaatacaatactataaaaattggttggatgggccattcagaatgacatgacatggatggacgttacgtcaattttgactgaaaaaataattaattttctaaaaggataaacactttctgacgtgagtgataaatggatagccacaagccttaaatcaacgagctcagttattagccaaaaaaaaaaaaacgagctcaatttaaggaaatatggggcaaaaagaaaaaaaggcgcagaattggatctaaataatttggtcaatagactgtaattttttggttaggtttgaataaataaaatcaattttatttttctatctgtacaatttattccgtcagtttgttaggtaagatattatgagttggtttataggtacacaattttattcatttctcaatctttaagaaataggtagtaggtagcagctcttcctcttttcctaaccgtgatcaatacaataacaacctagtataatcctacttagtgaggtctggggagggtagtgtgtacgcagaccttacccctaccctggggtagagaggctgtttccaaatagacatccggcatccttccctctaaggctttcccaccttgcttttggggcgactcgaattcacaacctcttgattggaagtggaggttgcttaccatcagagcaacccttcttgtctaatcgcgatcaatatgatattaaatcttatgcattcttgaactctagtaataatcggtaacataagcattaataagataaaagattttaattagatcgggtctttaattctttatacgtatgtattctattactagtattagtacccgcacgatgtgcggataattttatgatcctcctaaattctataaattaaaaagaacaaattatatgtgtcacgacccaaaatccactaagggttgtgatggcgccgggcaccgctgtcagacaagccaaacaaaattcttaattaaattctcatttaaataattgtgaaaaactctgatttttctttaatttttactagtaaaagatactcagttcaaattaaatatagtcaataaaaaataccccataactaggaatgaaataaaatacagtaactatctgaaatacaagtggacagaaataaaaatacagtacaatactctgaaagagactctgttggctacggttgtctcgataaatgcaactcacctgagtcttcgtatcaactatgccgctatgccgctagccacacatgaacatgtgtaacaaaaatgtacagcaagtgtagtatgagtacaaaaacaacgtgtacccaatgaatatcccgtctaatctcgaagaagtagagacgagaggtcgacttcgacatttactagtggtccaatagtaatatattattaatgcgagtaatcatggatttactaagaacaacagtaatttcaaataagtcacgaaacaggtaagagttcctttttattaaaagtctccggattcataatccattaattaacaattatctcaagtcggggagagcaaatatcaatatcaataactctccaggcaagcaatcaagcatgtgcaaatcatgccgaggacgtactgcccgatccaacaatatttaaactgtgcactgccggagggtcgaatgacgtgaaccatagatgcatctatttaatctgccgaggcgttcggcccgttccgaaattaaacacatatagatagtcaatcaagaagtcaacagggaataattatccaaagaaaaaccaattctcttttaacaattttataaaaaaaatgaagtttaatccttttagaaattcatttaccaattcgatagaatttaagcaattcatttgtcaataaggttacaaatattccaagtatagcatgcttttggatcctagactacccggactttcacatgatagtagctacgcacaaactctcgtcacctcgtgcgtgcgtagcccccacaattaggagcacataaccaattatttcacctatggggacaattccctcttacaaagttagaaaggagattcacctcgctccgaagatccatgaccgacatttcacgctcttccgaagactcgaatcgatgtacaatgctccaaaactagctaataattatgcaaatccattaatatatgttcaattattcatacaatccaatttataacaatttctaaccccgatcgaaaagttgacaaaattgcccttggccccacgtgcccggattccgaaatttttcgaagataaagtttacccatgaactcacgaactcaaatatatgattctctcctaatttcatacccaaaatcatggtcaaattccaagaatatcaatttcctaggtttcccctcaaaccccaatgtttctaccaatttttatgtccaaatccgtacataatcatgtatttaactaaaaactagcataaattacttatctcatgcttggtggtgaaaatggcaccttaaagttactccaaaatcggttccaatggaagaaatggggttgaaatgaacccaacccccgatttaaaagaacctctctgcctccagcatttccgcacctgcggtcccttgaccgcttctgtggttccgcaggtgcggcctttctaccactcctgcggtttctcaccaggccccttttccgcttctgcacctcaaccaccgcaaggtgcgttccggcttctgcggctacatgaccgcatctgcggtctcttcacttctagtcaaaccgcgtctgcgcccctcctagctgcttctgcggctccgcacctgcggcccaattctcgcaggtgcggttacaccagaaggcagcagcttcagctcttcctccaactctaattcgatccgttaaccacccggaatctacccgaggcacccgtgaccccaatcaatcataccaatcagtcccaaaacatattacggacttgctcgaggcctcaatcatatcaaacaacgctaaaatcatgaatcgacccccaatccaagcttaaggaactttagaatttcaaacttcaacattcgatgacgaaacctatcaaatcacgtccgattgacctcaaattttgcatacaagtcatatttgacattacggacctactccaacttccgaaatcggattccgaccccgatatcaaaaagttcacttccgatcaaacttctcaaaaaccttcaaatttctatctttagccaaatgactccaaaatgacctacagacctccgaattcacttccgatcgcgctcccaataccagaatcaccatacggagctattcccagactcggaatctcaaacgtacgttgataaccctgaaatgcttcaattcaaacttatgagattcttccaaaaatactaacttccacaataggcgccgaaacgtttccgggtcttccaaaacccagtccgtacatacgcccaagtccgaaatcatcatacgaacctgctggaaccttcgaatcccgattccgaggtcgtttactcaaaaatccaacctttgtcaattctttcaacttaaagcttccgaaataagaattctctttccaaatcaactccgaacttcctggaattcaattccgaccgtgcacacaagtcataatacctgaagtgaagctgctcgtagcctcaaactactgaacgacgcactagagctcaaaacgaccaatcgggtcgtgacaatatgaataactattgacataaacttaaatattataatcccatatgtagtcggtgatacagacaaataaaaatacaatatgattcaaaaacaaatactccttctctgtcaatttacataaaatatttttcttattaatctgttccaaaagaatgtcacatttatgtatttgaaaataattcaacgttattttttttattttacccattttacatattatgagaagtttttacactcatacaaatatcatgaccccacaaaactgttaggatcataagtttcaaaagttttctttttcgttctcaaattctgtgtcaagtcaaactatctcatctatattgaaacttagtgaagtcatactatatagactaataaaaaataaaaatacatttagtaatatcttaatttaaattataaatattatattattatctcaacataataaattcttgcatcaatatcaacttctaccaacctaaaattatacaatgacaaattaatatatacatgcatgataatttattaacaacaaatatattctaacttttgagagttaccaaacttataaaacaattggatcgtcaattgttcaataattttgctagttaactcaattttaaccccacaattaaagtcactttatttttttttaaaaataatacctttgggatatagttaagattaatatattataattaaataaatattatcctacttaaaaatatttttcttctacgatgcacatgtactaaaaggcgatgagttcttacatgtaattcttaattaaatgaatcttaccttatgatttttgtaattcattttattttgtgtaaatagcaattccaaatagtgtaattatattcatctatgtgtttagcctatccaaatctctctctctctctctcacacacacacacacacacacacacacacacacacacacacacacacatatatatatatatatatatatatatatatatatatatatatatatatatatatatatatatatatatatatatatatatcgaccccatcggttgctcgatcaattagctcatacaatttgagagaacgtaaatatcaacaacgggctaaaaagttattgtccatacccgagccattagagaagaatctatcctcccttatctatttagcatagcaaccgctagcactaatagaaaaaataaaaaaatatatatattgcttccaaacaattgagatataaaataagttataaagaattggataattaattttaccgtaaggcaacacaattgacatttgttccgtcgatgtctgagtcgattcatagtttaaaacgttatcccaacagaaatgtatgtcatcagttcctttattcttgtgtaattttatggttgatcaactcccttccaacattatgagttgctttaaacattgatagaatcgaactatatttatgtgaccattctctttctgagaatcattttaaaagtattagactccaaaccacatacatcacacgtcatgattctcaaaactgaaaatgctaattgagcaagagatatagatttatttttaaattaattaaaagtatcaatttaccacactatctttataccccctccccccgtattattccctctactatgaaatttaatataattatttcatttatatggaagtttgactttaaatttccatttaaattaactatataataatttaagttatatttaaatttttataatttgtttctcagaattatgtcaattgtttatattttttttaattttatctattataatggtttaaatacgtgtatctcatttatatagtatgacttagatcattaatattttaaaagttttctcttctcaaagatcaataagtcttatcattatgcatatatctactactgaaattatttaattacatattttttcttctttttttgattccttgttcgtgttattgcattacccataacttagagttgttcatattatagtccacaactctcattaatagatgaatttagtttttctttttcttgtaataaaaattatattcattacttttttattctactgctcaaattaatatttaaatttatcaataatatttttgaatatcattttattttttatcttcattttatattttagcctttaaaaaattatttttattgtatacttgtttaaaattcagaaaacttagtctaaaacagacactttggattatccattatgaaataaataaattattaaatatatatacattctgaactttaggttaaaagcttaaaatatatttatcttcaacttattgaaaagtattaaatttttacaataaattaaaattatacattagattacggtaggatatattcttctcactcgatattagaaaaggaatcaaaatactattaatatcaaaattctttacttttcaaataaaaaattacagttagaaaatattagtagaatgattgagctttatttttttttaaaaagaattcttatttcaatttaatttcaataaatgaaattccatatatagttcttaagtgatattttcttatttgataatctcccataatcttaaatttaaaattgtcaagtgattttataataacttgtctcttagacttaactacaatacaagctttcttgctttaatatatatccttcgagcataaacatggttaaacctatcttaagattcattcacatttccattattaattggaactacttgattgagtttgtatagaaattttggtgggtaggtgggggtggggtccaagattcatgtgtagctagccacgtgtacctctagtttctagataaaagcaagatgatgttacacctgatcaacttaacactacaagacaaaaatttcttgtacatgtctcctaggggtgttcatgggttgatttggatcgattttttttctaaaaaaaaatcaaaccaagtaagtcagttttttaaatattagaaccaaaccaaaccaattaagtcggttttctcgattcagtttatgtcggtttttcgattttttcggttatttgtcgattttcccttaaatataagacatacattaccaaacacacatttcggcgaccacattttcaacgtaacactatcaaatcaattgtcctttgagaaatctattatttatcaagatatattgatgataattaaatcaaatagtgatgaataatttaaggactcaattaaaaaatatattatttttaacatgaaatagattcttacatttaacaaaagaaaattgccaattaaactagaatgtaaaggtaaaaaattgtactaaatgtgcaaatgattaatatttactataaaaattttaaaactttgtataaaggtatacatatatataggtgtaataataaatttaaaataactactcctatattcggtttggttttttttttttaattaaaaccaaatccaaaccaaatttgatcggtttttaaattttaaaactaaaaccaaaccaaaccaaaaagtatcgatttttttagtcgatttagtttggttttcggcttggttcgggttttcggatttttatgaacacccctaatgtctcctttatttagtactcttgtcagttgatacttttttttcaattcattccattacataaacttgcattgattttattaatttgtttcgctttgtgtttgaagaggagcgcttctccaaaaaaaaatatcgaatatttcgcgttgcgtttaaagaggagcgcttctcgcttcttaaaatatcaaacttgagatccctaattaaacgtgaaatgattaatttgatttgcgttgcgtttaaagaggagcatttctcaaaatataaaactaagtgggcgtttggacataagaattgtaaaattcaaaaaaaaaagtaaaaaaaaaattaagtgaaaatggtatatgaaattagagttgtatttctcaacattgtgagtattttgaatgaaaattttgaaaagtggctttttggagttttgtaaattttcgataattttcaaaatgcattttcaagtgaaaatttaaaatgttatgaacaaacgctgattcaggaaaaaaggaaaaaaaaaaaacaaaaaattcttatgtccaaacggactctaaaatttctaattaaacgtggaggaattagtcatccggacagagtgccacagtgcttggccctgtctcattttgtagttggctatcatcaaaaatgacaaaacaagttccttcttctactgtcttaactcatcaaatattcttgataaatggagtttcaagaaaaacttagaatttacttgacatgatataatgggattcctcagaatcctcctctctaattctaggctaattcatagaattggtaataaacaaccagttggcaaattccatggtgcacttgttggttcttcaacaagtcttctatcatttcaccggtttgagtctaccaacacactcaaattagtgcaaccttctctctttactgaaaatgatgataatgattattttcaggttattttcacttcaccaacttctattcactcatttttctttctcttgataattatataaacagttttgaatttggaaaatttattttgtgtcaaaattcttgctttatttctacggtgcacgatagaatctatataggctatacgatttagtttttttggggttaagtttgtcatattagtatatttactttaggtccagtctattctaagagtcttttagtactcaaattgcttaaatgtactactaggaaacttttactactccaattttattttatgtaatattggacagaaatgagcttaaatgtagcgacatgaacaacgatccgacattaaattgctaggtattgaggcataattgttgtatggttacaaagcttattactgaatatggaattggcaggtcatggattttcctggagggcagcttccaattactcctcaaatgaaatttattgcagagtcatctgaaaagaggttaccttgttatagagtccttgatgatgatggctatccaattccaggcagcatttttgaggaggtatttgcaattctttcaagtctagttagaatatccatttctatgaattttgatgtatttacttggtttaaaatgtggtaggtgagcaaagaattggctgtaaaaatgtatagttcaatggtgacacttcaagttatggataccatattttatgaagcacaaaggcaggggaggttatctttctatctcactactgctggagaagaaggtatcaacatagcatctgctgctgctctctccgtcgatgacttcgtcttgcctcaggtgctcgcttttcttcttcgatttatattatgcatcttcataggcgagttcgagatctacagtcagtatgttcaaaataagtgcagtgtttttgtaggtatatattttaaattttcctgcaaatgtatgcattgtacgagtcgaaagtaatgagtttagttaaacccacataaccggcattggatccgcctatgttcctgttcatatagcccataccaactttctcttatcgttttttttccaaatatactgtattcttgttcattcttttttcttttttctttttgtgtgtgtgtggggggtggggggtgggggctaagttgctctgactcggcatttaggtgccgcacccgtgtcgacacgacactagtatgggtgtgggtatgagatccgtaccggatctgatcaaataattttcggtactttgaccacgatggacggaaaaatttgagacaagatacaatttgattcccatattcagaaccaaaactacgtaagaaaattgcataccttatctaggaagtcaatcatttacttatctacaacttgagaataaaaaagaaaatcatactttacaagttatacgtaagtatttctaaaaaaatttcataatttagagatatttttatattttatttttttgaattgtttttagccggatccccgccctcgtatccgtactaggatccatattccgaatcttagaatttacgtctcgaaagattcgacctctagattcgcacccgtgtcggacaccagcaccagtgcctgagcaacttgaaccattgaatccagtttgtcttagagatgagtatttatcaaacacatttagcattagcacaatgattgaaccattgaatccaatgtctttttattgatgtccgtgttagtagattttaacaatagttttatgatcctataaataacctggaaacgatgtaatttaacatgttattatccatcacagtatagggaagtaggggttatcttatggcggggcttccccctgaaagatattgccaatcaattgttcggaaacaagtttgattatggaaaaggaaggcaaatgccatgccaccatggttctaatgagctcaattacttaactatttcttcgccaatagcgtaagatttcaaacatttagcatttcctttctcccctttctctaaatattcaggaatttcgatctaaaacaattttctgctccaaattccatttacctcaggacacagattcctcaggccgcgggcgttgcttactctctgaaaatggataaaaaggaggcttgtgctattacttatcttggagatggtagcaccagtgaggtgattaaattaagcaaattaatgcgatttttaagagacttaactaatcaaatggaattaatagctgattttcttttgatatatttgcagggtgattttcatgctgctttaaactttgcagcggttttggacgctcctgttgtctttatatgccgcaacaatggatgggccattagcactcctgtaaacgaacaatttcgaagtaattttcgaaactatttgatacaaagtgcaccttttactagtaattttctccatcttatttaaaggcttttctcctatgtgtcgtaatggcaggtgatggagttgcctcaaagggtcaagcctatggaattagaagcattcgtgtagatggcaatgatgtcttggcaactcatagtgctattcgtgcagctcgcgaaatggcaattaaggaacaaaagccaatattagtagaggtgaagtgttgctccttcataaagaccaatatctgttcagctatgatatctgtactgaatcttgaaatagttcatgtagaaactttcatactaaaaacttccaacatttatgtaacttttaggccatgacttatagagtagcccaccattcaacatctgatgattcaaccaagtatcgacccgtcgaagaaatagagcactggaaaacagcaaaaagtccaatatccagattcagaaaatggattcagagaaatggttggtggaatgatgaaaatgaatctgaacttcgcggagacaccagaaaacaggtgaagatttcaagaatcatatatactcagtagaacttgattgattttcttctgataatgcaagtaacagtttaaaatggttatttttgaattaggtattgcaagtaatgcaagcagcagagaaggtggagaaacctccattgacagatttgtttacggatgtttatgacaaagtgccattaaatcttcaagagcaacacaagtttattagggatgctgtaaagaaatctccaagagagtatccttctgatgttcctatataa

SEQ ID NO: 43 - protein, 365 aa, Nicotiana sp.
MAFLATISGHENMLLSNTLNNNFIFSGKPPQRHSYSFLPKKIQARSVANSSKTFQVKEEEFSSKTEKFILPKFDFEEYMKMKAIKVNKALDDAIPMQEPIKIHEAMRYSLLAGGKRVRPILCMASCEVVGGDESLAIPAACSVEMIHTMSLIHDDLPCMDNDDLRRGKPTSHKAFGEDTAVLTGDALLSLAFEHVASKTKDVTPQRVVQAVGELGSAVGSKGLVAGQIVDIASEGKQVSLTELEYIHNHKTGKLLEAAVVCGAIIGGGNEIEVERMRNYARCLGLLFQVVDDILDVTKSSEELGKTAGKDLVTDKATYPKLMGLEKARELAGELVAKAMDELSYFDAAKAAPLYHFANYIAHRQN

SEQ ID NO: 44 - protein, 366 aa, Nicotiana sp.
MKSMNLVDSWAAQVCSVFNQTIPNKTFTGFMKIPVKNPSFLKQKRPFSALSVSAIATKEDEKVKEVETQKEQFNFKTYVAEKAISVNKALDEAVIVKDPPVIHEAMRYSLLAGGKRVRPMLCLAACELVGGDQSNAMPAACAVEMIHTMSLIHDDLPCMDNDDLRRGKPTNHKVYGEDVAVLAGDSLLAFAFEYIATATAGVSPSRILAAIGELAKSIGTEGLVAGQVADIACTGNPNVGLDTLEFIHIHKTAALLEASVVLGAILGGGTDEEVEKLRIFARCIGLLFQVVDDILDVTKSSEVLGKTAGKDLAVDKTTYPKLLGLEKAKEFAAELNRDAKQQLVEFDPHKAAPLIALADYIAYREN

SEQ ID NO: 45 - protein, 797 aa, Nicotiana tabacum
MQVIITSSHRLFCHLHQLKSPTSLSAQQAEFKKHGPGNWLFQTEGSLLYKPLRLNCAPSDASYLGNVIEYLESNRSNNSEEKDIQVNRKIQIKSLTEEIKHMLNSMEDGRSSVLAYETAWVSFIPNTTNNQRPMFPSCLEWIIDNQLCDGSWGEEIVLCIYDRLLNTLACVVALTLWNTCLHKRNKGVIFIKENLMKLETEEVEHMTCGFELVFPALLEKAKQLGIDIPYDAPVLKDIYVRREVKFTRIPKDVIHTIPTTVLFSLEGLRDDLDWQRLLKLQMPDGSFLTSPASTAFAFMETNDETCLAYLQNVVQKCNGGARQYPLDIVTRLWAIDRLQRLGISYYFAEEFKELLDHVFRYWDEENGIFCGRNSNFFDVDDTCMAIRLLRLHGYDVSPEALNNFKDGDQFFCQRGEVDGSPSHMFNLYRCSQVLFPGEKILEEAKNFTYNFLQQCLANNQCLDKWVIAKDIPGEIRYALEFPWYASLPRVEARLYIEQYGGADDIWIGKTLFRMPDISNNVYLQAAKLDYNRCQSQHRFEWLIMQQWFEKCNFQQFGISKKYLLVSYFLAAASIFEVEKSRERLAWAKSRIICKMTTSYYNEKATTWTTGNSLLMEFKDYPSRNNGNETKEIIVLNNLHQFLHQLSEETFEDQGKDIHHQLQKAWETWLMSLREEKDTCQEEAELLVRTINLSGGHMTHDDILFDADYKNLSNLTNKVCHMLNEIQNEKVTGSSKTTNIEFDMQALVKLVFGNISNNINQDIKQIFFTVVKTFYYTAHVSEEIINFHISKVLFQQVQ

SEQ ID NO: 46 - protein, 792 aa, Nicotiana tabacum
MVLGLRSKIIPLPDHKLGNIKLGSVTNAICHRPCRVRCSHSTASSMEEAKERIRETFGKIELSPSSYDTAWVAMVPSRYSMNQPCFPQCLDWILENQREDGSWGLNPSHPLLVKDSLSSTLASLLALRKWRIGDNQVQRGLGFIETHGWAVDNKDQISPLGFEIIFPCMINYAEKLNLDLPLDPNLVNMMLCERELTIERALKNEFEGNMANVEYFAEGLGELCHWKEMMLRQRHNGSLFDSPATTAAALIYHQYDEKCFGYLNSILKLHDNWVPTICPTKIHSNLFLVDALQNLGVDRYFKTEVKRVLDEIYRLWLEKNEEIFSDVAHCAMAFRLLRMNNYEVSSEELEGFVDQEHFFTTSSGKLMNHVAILELHRASQVAIHERKDHILDKISTWTRNFMEQKLLDKHIPDRSKKEMEFAMRKFYGTFDRVETRRYIESYKMDSFKILKAAYRSSGINNIDLLKFSEHDFNLCQTRHKEELQQMKRWFTDCKLEQVGLSQQYLYTSYFIIAAILFEPEYADARLAYAKYAIIITAVDDFFDCFICKEELQNIIELVERWEGYSTVGFRSERVRIFFLALYKMVEEIAAKAETKQGRCVKDHLINLWIDMLKCMLVELDLWKIKSTTPSIEEYLSVACVTIGVPCFVLTSLYLLGPKLSKDVIESSEVSALCNCTAAVARLINDIHSYKREQAESSTNMVSILITQSQGTISEEEAIRQIKEMMESKRRELLGMVLQNKESQLPQVCKDLFWTTINAAYSIHTHGDGYRFPEEFKNHINDVIYKPLNQYSP

SEQ ID NO: 47 - protein, 687 aa, Nicotiana tabacum
MILGLRSKIIPLPDHKLGNIKLGSVTNAICHRPCRVRCSHSTASSMEEAKERIRETFGKIELSPSSYDTAWVAMVPSRYSMNQPCFPQCLDWILENQREDGSWGLNPSHPLLVKDSLSSTLASLLALRKWRIGDNQVQRGLGFIETHGWAVDNKDQISPLGFEIIFPCMINYAEKLNLDLPLDPNLVNMMLCERELTIERALKNEFEGNMANVEYFAEGLGELCHWKEMMLRQRHNGSLFDSPATTAAALIYHQYDEKCFGYLNSILKLHDNWVPTICPTKIHSNLFLVDALQNLGVDRYFKTEVKRVLDEIYRLWLEKNEEIFSDVAHCAMAFRLLRMNNYEVSSEELEGFVDQEHFFTTSSGKLMNHVAILELHRASQVAIHERKDHILDKISTWTRNFMEQKLLDKHIPDRSKKEMEFAMRKFYGTFDRVETRRYIESYKMDSFKILKAAYRWEGYSTVGFRSERVRIFFLALYKMVEEIAAKAETKQGRCVKDHLINLWIDMLKCMLVELDLWKIKSTTPSIEEYLSVACVTIGVPCFVLTSLYLLGPKLSKDVIESSEVSALCNCTAAVARLINDIHSYKREQAESSTNMVSILITQSQGTISEEEAIRQIKEMMESKRRELLGMVLQNKESQLPQVCKDLFWTTINAAYSIHTHGDGYRFPEEFKNHINDVIYKPLNQYSP

SEQ ID NO: 48 - protein, 797 aa, Nicotiana tabacum
MILGYGSIIILPFSHHKLGNGKLCSSTENTICQRPCRGVRCSYSIASSLDGFDEAKERIKKSFQKVELSPSSYDTAWVAMIPSINSVNQPCFPQCLDWILENQREDGSWGLNPSHSLLVKDSLSSTLACLLALRKWGVGDNQVQGGLVFIEKHGWAVDNKDLISPVGFEIIFPSMIKYAEKMNLNLPLDPDIVNLAIRNRDLAIERALQNDFKGNIANFEYMAEGLSELCQWKEIMVHQRDNGSLFDSPATTAAALIYHQHDEKCFEYLNTILKLHKNWVPTIYPTKIHSLLCLVDTLQSLGVDRHFKTEIENVLDEIYRLWQQKNEEIFSNVAHCALAFRLLRMSNYEVSPEELVEFVDEVHFFSTSGKFTSHFEILELHKASQLAIHGKDHILDKISNWTGSFMEQKLLTYDYIDRMSKNEAEFALRKFYATYGRVENRRYNEAYEVNNFKILKAAYRSPTINSIDLLRFSKQDFNLCQAQHQEELQQLKRWFEDCGLEQVGLPQQNLYTNFFLTAALLYEPEFSDARLACVKNTMLLTLVDDFFDGYVGKDELLNIFELVERWDGNYSTVQFHSERIKIFFSALYKTIEELAAKANIKQGQCIKEHFINLWLDLLKNMLVEFEWWRNQTTPSIEEYLSVACETIGVRCITLITQCLLGPKLSNDVLQSSEMSALCNCTSMVARLLNDVGSYKREEAESSPTNIVSILINQSEGKISEEEAIKHAKEMLENKRRELLGMVLIQRKGSQLPQVCKDIFWKTCKSSYFAYSDGDEFRFPEEILKNRINELLFKPLKS

SEQ ID NO: 49 - protein, 415 aa, Nicotiana sp.
MLFARGWSQISRRSINRCRWLRSQQQQFHHSNHFPSPIDASHKVLGCRVIHSWVSNALSGIGQQIHHQSTAVAEEQVDPFSLVADELSLLTNRLRSMVVAEVPKLASAAEYFFKMGVEGKRFRPTVLLLMATALNAPVLRPQVDVDSLSRDLRTRQQCIAEITEMIHVASLLHDDVLDDADTRRGIGSLNFVMGNKLAVLAGDFLLSRACVALASLKNTEVVSLLATVVEHLVTGEIMQMTTSSDERCSMEYYMQKTYYKTASLISNSCKAIALLAGHTAEVSMLAFDYGKNLGLAFQLIDDVLDFTGTSATLGKGSLSDIRHGIVTAPILYAMEEFPQLRTVVDRGFDDPVNVEIALDYLGKSRGIQRTRELARKHANLASAAVDALPESDDEDVQRSRRALVELTQRVITRTK

SEQ ID NO: 50 - protein, 613 aa, Nicotiana sp.
MDVAISTNVWMLHMATSKIPPPPAATCLISSFSREKPSLVSKASCLSTAAAGRSMKTEPSPNQYSAISSSDQNLSRRSGNYQPTMWDFEYIQSIHNDYAGKKYMNRFNKLKEEMKKMIMAEGSQELEKLELIDNLQRLGVSYHFKHEIMQILSSIKQHSTPADSLYATALKFRLLREHGFHISQDILNDFKDEQGNLKQSLCKDTKGLLQLYEASFLSTETERTFLESAISHLQNYLNNHLYGEDNVTVSLVSHALELPLYWMMLRVETSWYLNINENISNANPLLLELAKLDFNIVQATHQEDLRILSRWWKSTHLAEKLPFSRDRLVEALFFAVGIIFEPQHSYCRRMLTKVIAFVAVIDDIYDVYGTPDELEVFTNAIERWEVKAMEQLPDYMKVCYLALFNITNEMAYEILKEQGINVLPYLTKSWADLCKSYLQEARWYYNGYTPTLEEYMDNAWISVAVPMVLVHAFPLVTNPVTKDAFESLSKYPDIIRWSATIFRFADDLGTSSEELRRGDVPKSIQCYMNEKGATEEEAREHISICIKEKWKLLINTAQRENSLFSETFIGCAINIARTGQSIYQHGDGHGIQNFEIKNRISKLFFEPIRISIP

SEQ ID NO: 51 - protein, 545 aa, Nicotiana sp.
MDLRRSGNYKPSIWEDGYVQSRATFYAEEKHFERAAGLKEEVRRMLGKTIDPFEQLELVDILQRLGLSYHFEEEIDRVLKQMYVNIYTTNRNDGQKSEDLYATALEFRLLRREGYHVPQEMFCTFMNKEGKFKTSLVVDTKGLLSLYEACYLSMEGESILEIARDFATNYLTESLKKKIDENLTEQVSHALEMPLHWRMQRLEARWFIEVYHKRENMNPLLLELAKLDYNMVQATYLEELKEMSRWDKNIKLVKKMSFVRDRLVEGFLWAVGFTPNPQFGYCRKFSTKMSVLLTAIDDIYDVYGTMDELELFTDIVDRWDINAIERLPDYMKICFLALFNSMNELAYDILKEQGFSIISHIRKQWANLCKAYLLEVKWYQSRYTPSLNEFLRNAWITNTGPVLIMHAYFCITNPIKEEELECLKNYPAIIQSPSLILRLANDLATSPDEIKKGDYLKSIHCYMHESGRSEENARNYIKKLIDQTWKKMNKDILRGSSFSKDFRTAAMNLARIAQCMYQHGDGFGIPDRETKDRICSLFFEPIPLS

SEQ ID NO: 52 - protein, 460 aa, Nicotiana sp.
MLHMIGGEPHHVLRDLAKKYGPLMHLQLGEISAVVVTSRDMAKEVLKTHDVVFASRPKIVAMDIICYNQSDIAFSPYGDHWRQMRKICVMELLNAKNVRSFSSIRRDEVVRLIDSIRSDSSSGELVNFTQRIIWFASSMTCRSAFGQVLKGQDIFAKKIREVIGLAEGFDVVDIFPTYKFLHVLSGMKRKLLNAHLKVDAIVEDVINEHKKNLAAGKSNGALGGEDLIDVLLRLMNDTSLQFPITNDNIKAVIVDMFAAGTETSSTTTVWAMAEMMKNPSVFTKAQAEVREAFRDKVSFDENDVEELKYLKLVIKETLRLHPPSPLLVPRECREDTDINGYTIPAKTKVMVNVWALGRDPKYWDDAESFKPERFEQCSVDFFGNNFEFLPFGGGRRICPGMSFGLANLYLPLAQLLYHFDWKLPTGIMPRDLDLTELSGITIARKGDLYLNATPYQPSRE

SEQ ID NO: 53 - protein, 509 aa, Nicotiana sp.
MEAKHLSFIFISVLIFVSFIIRLFQIWKASKTFNKLLPPGPWSLPLIGNLHLLMNGRLPVHHTFRSLSRRYGPIFHLRLGEISIIVVSSPEMAKEIMKTQDLRFATRPEFMSGDIIFYNYTDIITCPYGDHWRNMRKVCIVELLSAKMVKSFNSIRQAEMSSLISSINSMPDDSLINLSDKMFWFTSSVTCRSAFGKVIHDQHKLIMLVKDIASLAAGFDLADMFPSRKWLHKITGLKSKMLKVHTKVDAILENIINEHRESRTNGKKGNGETGGEDLIDVLLRVMESGELGTPLTKKNIKGVIFDMFLAGAETSSTTIIWALAEMIRNPSVMAKAQLEVREVLKGKRTFEDIDLEELKYLNLVIKETLRLHPPVPLLLPRECREETKIDKYTIPIKTRVLVNVWAMGRESKYWHNPESFIPERFENNSIDFKGNHFEFIPFGAGRRICPGLLFGLVNVGHPLAQLLYHYDWKTPPGITPDNLDMTETIGVAGGRKDDLCLIVTPFGLS

SEQ ID NO: 54 - protein, 206 aa, Nicotiana sp.
MQDMFLAGAETSATTIIWAMAEMIRNPSVMAKAQLEVREVLKGKRTFEDIDLEELKYLNLVIKETLRLHPPVPLLIPRECREETKIDKYIIPIKTRVLVNVWAIGRESTNWHNPESFIPERFENNSIDFRGNHFEFIPFGAGRRMCPGLLFGLVNVGHPLAQLLYHFDWKTPHGIAPDNLNMTETIGVAGGRKDDLCLIATPFGLS

SEQ ID NO: 55 - protein, 261 aa, Nicotiana sp.
MQKLEGKVATVTGGASGIGEAAARLFAHHGARVVIADIQDEKGRALAESIPFQRCSYVHCDVSDETQVKAMVDWTVQKYGQLDIMFSNAGVVGNSGQKVIDLDLSEFDRVLRVNARGMAACVKHAARAMVEQRVRGSIICTASIAASRAGPWRTDYVMSKHAVLGLVKSASRQLGEYGIRVNSVSPSAVMTPIMLSAEQETSLKVLKMYGNLTCLKGITLTVKHLADAVLFLASDDSAFVSGHDLVLDGGLLSLPSPNSSL

SEQ ID NO: 56 - protein, 261 aa, Nicotiana sp.
MMASLFLRFHLASAGDKSIRNGEEFGVMPSNLLQKITPAIGIALPDYLSCLGMPGITAWVGIEKIGNAKAGSNVYISAAAGGVGIIAGQLAKVKGCRVVGSVGSDDKVKLLKEECGYDDAFNYRVETDYDAALTKYFPNGIDVYFDNVGGKMLEAVLNHVNHGARIALCGMISEYNKVWTEREGVRNLLNMVGKEVMMKGFMVGSYYNHFEEFIKEMEVYLKEGKIKSKHKIYNGIESFLESLASLFSSSNVGKVILQVTP

SEQ ID NO: 57 - protein, 321 aa, Nicotiana tabacum
MAEKITSHENTRYAVVTGGNKGIGYETCRQLAKEGIVVVLTARDERRGIEALEKLKEEYSSNKTDDDQILFHQLDVMDPASISSLVDFIKTKFGKLDILVNNAGIGGLMVEGDVVIIKDLIEGDFVTISAENGEEDGIKKSIEGIERIVTDYELTKQCLETNFYGAKRMIEAFIPLLQLSNSPRIVNVASFLGKLKLLCNQWAIGMLSDAKSLREERVDEVLNEFIKDFKEKSIEAKGWPTYFSAYKVSKASLIAYTRVLATKYPNFRINSVCPGFCKTDVNCNTGSLTAEEGAESLVKLALVPNDGPSGLFFYRKEVTSF

SEQ ID NO: 58 - protein, 494 aa, Nicotiana tabacum
MSVFAVISFFLLLFFLFKSYLPSSKTKKNSPPSPSKLPLIGHFHKLGLQPHRSLQKLSNEHGPMMMLQFGSVPVLIASSAEAASEIMKTQDLSFANKPISTIPSKLFFGPKDVAFTPYGDYWRNARSICMLQLLNNKRVQSFRKIREEETSLLLQRIRESPNSEVDLTELFVSMTNDIVCRVALGRKYCDGEEGRKFKSLLLEFVELLGVFNIGDYMPWLAWMNRFNGLNAKVDKVAKEFDAFLEDVIEEHGGNKKSDTEAEGADFVDILLQVHKENKAGFQVEMDAIKAIIMDMFAAGTDTTSTLLEWTMNELLRNPKTLNKLRDEVRQVTQGKTEVTEDDLEKMPYLRAAVKESSRLHSPVPLLPREAIKDAKVLGYDIAAGTQVLVCPWAISRDPNLWENPEEFQPERFLDTSIDYKGLHFELIPFGAGRRGCPGITFAKFVNELALARLMFHFDFSLPKGVKHEDLDVEEAAGITVRRKFPLLAVATPCS

SEQ ID NO: 59 - protein, 598 aa, Nicotiana sp.
MSQSISPLICSHFAKFQSNIWRCNTSQLRVIHSSYASFGGRRKERVRRMNRAMDLSSSSRHLADFPSTIWGDHFLSYNSEITEITTQEKNEHEMLKEIVRKMLVETPDNSTQKLVLIDTIQRLGLAYHFNDEIENSIQNIFNLSQNSEDDDEHNLYVAALRFRLARQQGYYMSSDVFKQFTNHDGKFKENHTNDVQGLLSLYEAAHMRVHDEEILEEALIFTTTHLESVIPNLSNSLKVQVTEALSHPIRKAIPRVGARKYIHIYENIGTHNDLLLKFAKLDFNMLQKLHRKELNELTSWWKDLDRANKFPYAKDRLVEAYFWTVGIYFEPQYSRSRSLVTKVVKMNSIIDDTYDAYATFDELVLFTDAIQRWDEGAMDLLPTYLRPIYQGLLDVFNEMEEVLAKEGKADHIYYAKKEMKKVAEVYFKEAEWLNANYIPKCEEYMKNGLVSSTGPMYGIISLVVMEEIITKEAFEWLTNEPLILRAASTICRLMDDMADHEVEQQRGHVASFVECYMKEYGVSKQEAYVEMRKKITNAWKDINKELLRPTAVPMFILERSLNFSRLADTFLKDDDGYTNPKSKVKDLIASLFVESVDI

SEQ ID NO: 60 - protein, 238 aa, Nicotiana sp.
MSCQYYLTTTTSSLRIFSFTPRRYAPNSSASQPHEFFKKQVLFSSNLQCNAVSRPRAQVIKRDDNVEEVDSAEEQQEEEETQEVYRSNKIKQHIYAVRLMLQSMDDGEISISAYDTAWVALVKDINGSDTPQFPSSLEWIANNQLAECSWGDKSIFLAHDRIINTLACVIALKSWNLHIDKRELGMSFIRENLSKIGDENAVHMPIGFEVAFPSLIEIGKKIGIDIPDDSHVLREIYT

SEQ ID NO: 61 - protein, 606 aa, Nicotiana sp.
MASITINHSFSRNPNISFHPQNPLIQTQALFNFKPSISKCSPIIHCAIRRRPEYTPSHIPDPNYIRIFDTTLRDGEQSPGATMTTKEKLDVARQLAKLGVDIIEAGFPASSEADLEAVKLIAKEVGNGVNEEGHVPVICGLARCNKRDIDKAWEAVKYAKKPRIHTFIATSEIHMKFKLKMSRDEVVEKARSMVAYARSIGCEDVEFSPEDAGRSDPEFLYHILGEVIKAGATTLNIPDTVGYTVPSEFGKLIADIKANTPGIGDVIISTHCQNDLGLSTANTLAGACAGARQVEVTINGIGERAGNASLEEVVMALKCRGEQVLGGLYTGINTQHILMSSKMVEEYTGLHVQPHKAIVGANAFAHESGIHQDGMLKHKDTYEIISPEDIGLNRVNESGIVLGKLSGRHALQAKMLELGYDIEGKELEDLFWRFKSVAEKKKKITDDDLIALMSDEVFQPQFVWQLENVQVTCGSLGLSTATVKLIDADGQEHVSCSVGTGPVDAAYKAVDLIVKVPVALLEYSLNAVTEGIDAIASTRVLIRGENGHTSTHALTGETVHRSFSGTGADMDIVISSVRAYIGALNKMLSFRKLVSKHSKPEGSAVV

SEQ ID NO: 62 - protein, 492 aa, Nicotiana sp.
MAILISRSRNFNHFLLSTRFRFLSLLNQTSSETFFRHAKTSSFTTAAGGGFTKSTAAFSGESAAVFRLERFQSNKAGEQLNTLYYEEDENHQISYENQVMDFPGGQLPITPQMKFIAESSEKRLPCYRVLDDDGYPIPGSIFEEVSKELAVKMYSSMVALQVMDTIFYEAQRQGRLSFYLTTAGEEGINIASAAALTLDDFVLPQYREVGVIVWRGFPLKEIANQLFGNKFDYAKGRQMPCHHGSNELNYLTISSPIATQIPQAAGVAYSLKMDKKEACAVTYLGDGSTSEGDFHAALNFAAVLDAPVVFICRNNGWAISTPVNEQFRSDGVASKGQAYGIRSLRVDGNDVLATYSAIRAAREMAIKEQKPILVEAMTYRVAHHSTSDDSTKYRPVEEIEHWKTAKSPIYRFRKWIQRNGWWNDENESELRRDARKQVLQAMQAAEKVEKPPLTDLFTDVYDKVPLNLQEQQKFTRDAVKRSPKEYPSDVPV

SEQ ID NO: 63 - protein, 492 aa, Nicotiana sp.
MAILISRSRNFNHFLLSTRFRFLSRLNQTSSKTFSHHAKTSSFTTAAGGGFTKPTATFSGESAAVFRVERFQSNKTGEQLNTLYYEEDNHHQIIDENQVMDFPGGQLPITPQMKFIAESSEKRLPCYRVLDDDGYPIPGSIFEEVSKELAVKMYSSMVTLQVMDTIFYEAQRQGRLSFYLTTAGEEGINIASAAALSVDDFVLPQYREVGVILWRGFPLKDIANQLFGNKFDYGKGRQMPCHHGSNELNYLTISSPIATQIPQAAGVAYSLKMDKKEACAITYLGDGSTSEGDFHAALNFAAVLDAPVVFICRNNGWAISTPVNEQFRSDGVASKGQAYGIRSIRVDGNDVLATHSAIRAAREMAIKEQKPILVEAMTYRVAHHSTSDDSTKYRPVEEIEHWKTAKSPISRFRKWIQRNGWWNDENESELRGDTRKQVLQVMQAAEKVEKPPLTDLFTDVYDKVPLNLQEQHKFIRDAVKKSPREYPSDVPI

SEQ ID NO: 64 - DNA, 57 bp, Artificial Sequence
  Description of Artificial Sequence: Synthetic primer
ggggacaagtttgtacaaaaaagcaggcttgtgatgagatctatgaatcttgtcgat

SEQ ID NO: 65 - DNA, 54 bp, Artificial Sequence
  Description of Artificial Sequence: Synthetic primer
ggggaccactttgtacaagaaagctgggtaattttcacgataagcaatgtaatc

SEQ ID NO: 66 - DNA, 53 bp, Artificial Sequence
  Description of Artificial Sequence: Synthetic primer
ggggacaagtttgtacaaaaaagcaggcttgatggacgtggcaatatctacca

SEQ ID NO: 67 - DNA, 53 bp, Artificial Sequence
  Description of Artificial Sequence: Synthetic primer
ggggaccactttgtacaagaaagctgggtatggaattgaaattctgatgggct

SEQ ID NO: 68 - DNA, 53 bp, Artificial Sequence
  Description of Artificial Sequence: Synthetic primer
ggggacaagtttgtacaaaaaagcaggcttgatggtacttggactgagaagca

SEQ ID NO: 69 - DNA, 53 bp, Artificial Sequence
  Description of Artificial Sequence: Synthetic primer
ggggaccactttgtacaagaaagctgggtatggggaatattgattgagtggtt

SEQ ID NO: 70 - DNA, 49 bp, Artificial Sequence
  Description of Artificial Sequence: Synthetic primer
ggggacaagtttgtacaaaaaagcaggcttgatgcaattcttcagcttg

SEQ ID NO: 71 - DNA, 49 bp, Artificial Sequence
  Description of Artificial Sequence: Synthetic primer
ggggaccactttgtacaagaaagctgggtactctcgagaaggttgataa

SEQ ID NO: 72 - DNA, 55 bp, Artificial Sequence
  Description of Artificial Sequence: Synthetic primer
ggggacaagtttgtacaaaaaagcaggcttgatgtcggtctttgcggttatttca

SEQ ID NO: 73 - DNA, 48 bp, Artificial Sequence
  Description of Artificial Sequence: Synthetic primer
ggggaccactttgtacaagaaagctgggtacgagcatggagtggcgac

SEQ ID NO: 74 - DNA, 52 bp, Artificial Sequence
  Description of Artificial Sequence: Synthetic primer
ggggacaagtttgtacaaaaaagcaggctatgcaagttataattacgtccag

SEQ ID NO: 75 - DNA, 51 bp, Artificial Sequence
  Description of Artificial Sequence: Synthetic primer
ggggaccactttgtacaagaaagctgggtagacttgctgaaaaagcacttt

SEQ ID NO: 76 - DNA, 54 bp, Artificial Sequence
  Description of Artificial Sequence: Synthetic primer
ggggacaagtttgtacaaaaaagcaggcttgatggcgtctatcaccataaacca

SEQ ID NO: 77 - DNA, 49 bp, Artificial Sequence
  Description of Artificial Sequence: Synthetic primer
ggggaccactttgtacaagaaagctgggtatacgactgcactgccttca

SEQ ID NO: 78 - DNA, 54 bp, Artificial Sequence
  Description of Artificial Sequence: Synthetic primer
ggggacaagtttgtacaaaaaagcaggcttgatggcgattttgatatcaagatc

SEQ ID NO: 79 - DNA, 53 bp, Artificial Sequence
  Description of Artificial Sequence: Synthetic primer
ggggaccactttgtacaagaaagctgggtaaacaggaacatcagaaggatatt

SEQ ID NO: 80 - DNA, 49 bp, Artificial Sequence
  Description of Artificial Sequence: Synthetic primer
ggggacaagtttgtacaaaaaagcaggcttgatgttatttgcaaggggt

SEQ ID NO: 81 - DNA, 49 bp, Artificial Sequence
  Description of Artificial Sequence: Synthetic primer
ggggaccactttgtacaagaaagctgggtattttgttcttgtgatgact

SEQ ID NO: 82 - DNA, 49 bp, Artificial Sequence
  Description of Artificial Sequence: Synthetic primer
ggggacaagtttgtacaaaaaagcaggcttgatgcaaaagcttgaaggc

SEQ ID NO: 83 - DNA, 52 bp, Artificial Sequence
  Description of Artificial Sequence: Synthetic primer
ggggaccactttgtacaagaaagctgggtacaatgaactatttggagatgga

SEQ ID NO: 84 - DNA, 49 bp, Artificial Sequence
  Description of Artificial Sequence: Synthetic primer
ggggacaagtttgtacaaaaaagcaggcttgatgtcttgtcaatattac

SEQ ID NO: 85 - DNA, 48 bp, Artificial Sequence
  Description of Artificial Sequence: Synthetic primer
ggggaccactttgtacaagaaagctgggtaggtatatatctctctcaa

SEQ ID NO: 86 - DNA, 52 bp, Artificial Sequence
  Description of Artificial Sequence: Synthetic primer
ggggacaagtttgtacaaaaaagcaggcttgatggatcttaggaggtcagga

SEQ ID NO: 87 - DNA, 50 bp, Artificial Sequence
  Description of Artificial Sequence: Synthetic primer
ggggaccactttgtacaagaaagctgggtatgacagaggaatgggctcaa

SEQ ID NO: 88 - DNA, 55 bp, Artificial Sequence
  Description of Artificial Sequence: Synthetic primer
ggggacaagtttgtacaaaaaagcaggcttgatggaggcaaaacacttatcattc

SEQ ID NO: 89 - DNA, 54 bp, Artificial Sequence
  Description of Artificial Sequence: Synthetic primer
ggggaccactttgtacaagaaagctgggtaagagagaccaaaaggagtaacaat

SEQ ID NO: 90 - DNA, 52 bp, Artificial Sequence
  Description of Artificial Sequence: Synthetic primer
ggggacaagtttgtacaaaaaagcaggcttgatggcagaaaaaatcaccagc

SEQ ID NO: 91 - DNA, 54 bp, Artificial Sequence
  Description of Artificial Sequence: Synthetic primer
ggggaccactttgtacaagaaagctgggtaaaaagaggtgacctcctttctata

SEQ ID NO: 92 - DNA, 49 bp, Artificial Sequence
  Description of Artificial Sequence: Synthetic primer
ggggacaagtttgtacaaaaaagcaggcttgatgatggcctctctcttc

SEQ ID NO: 93 - DNA, 52 bp, Artificial Sequence
  Description of Artificial Sequence: Synthetic primer
ggggaccactttgtacaagaaagctgggtaaggagttacttgaagaattact

SEQ ID NO: 94 - DNA, 52 bp, Artificial Sequence
  Description of Artificial Sequence: Synthetic primer
ggggacaagtttgtacaaaaaagcaggcttgatggcgattttgatatcaaga

SEQ ID NO: 95 - DNA, 53 bp, Artificial Sequence
  Description of Artificial Sequence: Synthetic primer
ggggaccactttgtacaagaaagctgggtatataggaacatcagaaggatact

SEQ ID NO: 96 - DNA, 54 bp, Artificial Sequence
  Description of Artificial Sequence: Synthetic primer
ggggacaagtttgtacaaaaaagcaggcttgatgcaggacatgttcttagcagg

SEQ ID NO: 97 - DNA, 54 bp, Artificial Sequence
  Description of Artificial Sequence: Synthetic primer
ggggaccactttgtacaagaaagctgggtaagagagaccaaaaggagtagcaat

SEQ ID NO: 98 - DNA, 49 bp, Artificial Sequence
  Description of Artificial Sequence: Synthetic primer
ggggacaagtttgtacaaaaaagcaggcttgatgatacttggctacgga

SEQ ID NO: 99 - DNA, 50 bp, Artificial Sequence
  Description of Artificial Sequence: Synthetic primer
ggggaccactttgtacaagaaagctgggtacgacttgagtggtttaaaaa

SEQ ID NO: 100 - DNA, 50 bp, Artificial Sequence
  Description of Artificial Sequence: Synthetic primer
ggggacaagtttgtacaaaaaagcaggcttgatggcatttttggctacca

SEQ ID NO: 101 - DNA, 53 bp, Artificial Sequence
  Description of Artificial Sequence: Synthetic primer
ggggaccactttgtacaagaaagctgggtaattctggcgatgtgcaatataat

SEQ ID NO: 102 - DNA, 52 bp, Artificial Sequence
  Description of Artificial Sequence: Synthetic primer
ggggacaagtttgtacaaaaaagcaggcttgatgagtcaatcaatttctcca

SEQ ID NO: 103 - DNA, 50 bp, Artificial Sequence
  Description of Artificial Sequence: Synthetic primer
ggggaccactttgtacaagaaagctgggtatatgtcgacagattcgacaa

SEQ ID NO: 104 - DNA, 1243 bp, Artificial Sequence
  Description of Artificial Sequence: Synthetic polynucleotide
attagcatcaaccgggttagcaattggggcattattgcgatcagcgggaggcaccttgttgctgagcaccaaattattctttttgccgtgatggccagactcaacgtcaacgttcaagtgagcagaccaaaagtttaacttttttgggatggcttgaaattaagactttaaataataagcataaaatgaggtgttatggagattcggatcaaaccaccactattatccctagccccacggttgatgccaaactgtttatttcaaaatcggataacaattacatttgtatgcggttttaagaatatgtgatttaattcaacacgaacaattaagaatatcaaataatcaaattagagataaaataatcatccaaacgaattgcgatattatggctaaccatgagcttagactgaccgatgagctcgctcttggttgaccttcgagcccagccgtgaatgaagtacataacaaatgagcaaaaactttaacaatagctaaaaggcagaaagtaaacttgtattgctttgatttacatattacaacatgtgttacaaaagaaaaacttccaccctttatatagtggagagtttcatccccagtataaatctaaaaaaggtaaaaatcttcctttgctggtaattactaattcatgatcgacatcgagtgagatttgcaccgtaatatccggttgattgcgatatcacgatcctctatctgtcatgtgtaaccgtttatcatgcctcccgagatcttagaattcattcttggaccggggtgcatgcccaataacaggcacattgttcgcccttcatgaatctcaatatggagggtctttaacctcgattataattttgtgtatatgtactcttcctctattttctcgtcgaaaaatcggagtaaacattatccccgattttaccatacacatacgttttgcctaaataaaatgacaaaagagaaagggtgacgaaaactgtcactatgcctaactaaccctcgtagataccgtcttccgcgaaccctacacacccctaaggccctaaccccttcttcaccttactttattaattacctcactcacttttgtcctcttatgtaaccgtttccagtttaattacaaaaaaattcagattactttgaagcatcacttctctccctttcatataaactcagtttttttgttcgagtctttatacatatgtctttatcataactaaagtagtagcttaaagtgaaggtgaac

SEQ ID NO: 105 - DNA, 436 bp, Artificial Sequence
  Description of Artificial Sequence: Synthetic polynucleotide
ttcatgaatctcaatatggagggtctttaacctcgattataattttgtgtatatgtactcttcctctattttctcgtcgaaaaatcggagtaaacattatccccgattttaccatacacatacgttttgcctaaataaaatgacaaaagagaaagggtgacgaaaactgtcactatgcctaactaaccctcgtagataccgtcttccgcgaaccctacacacccctaaggccctaaccccttcttcaccttactttattaattacctcactcacttttgtcctcttatgtaaccgtttccagtttaattacaaaaaaattcagattactttgaagcatcacttctctccctttcatataaactcagtttttttgttcgagtctttatacatatgtctttatcataactaaagtagtagcttaaagtgaaggtgaac

SEQ ID NO: 106 - DNA, 1500 bp, Artificial Sequence
  Description of Artificial Sequence: Synthetic polynucleotide
aaaatatttgaaagaaaatattgtagctaaatgaatatttttccttcaagttattaaaagttgtggcaatataggttaaattagccacatgtttcttgctttaatagaattttgtagctaatcattaacttttaccacgagttgaaacttaatataacaacaataaccttttaaccataataaaccatttaaatcaaatattactaaataaataactttgcttcaagttctataaaatcatggcaatagtcattacgataaaatgatataaccacgaatatattgcaacgataaattctgtaactaatcattagtttttgcgacgaggtaaattttccgtcacagtagcaatcttctaggcacattaaaaatttgaaacaaaattttgtagtcaaataaatatttatcttcttattttaagaaaataaaaatagttagataatagttactactatttgtcatgaaaatatcaatagatacaaatttaaagtgactataaatttacgagtttactatactttagtcgtacagtttgcaataatagtattttaaccacaattagttatatgtacaaaatttcataagtgaataactttttttcaatgacaaaaataagagttgctcaaacaatatcaagttacaaaaatttaattttaactgtaaaagttatatttttccaaaataacataaactatagtaattatatatagtttgaagtattaataaaatttaaatatgcaaaagttaattttaataaaccatttgtatgcctacttgtagcctctaaactattttatttgctttatttatcaaactcatattttattttattgcaccttgttagttttggacgttaattatatatatttggtgtaaaatttaaaatatattaacatttgtggagaatttatgtatgcctggttcttaactattttttttttatataactggttagagtaatttcttatatttcagtatttatttttaaataagtcctcataaattgaagactttaaaagtttttgtgtcattcctctttttatttaagaaattgaagaattccgctaaatttcatattccgctgttatttaactgtttattcccttgttaatataattggtaagaagttttaaaataaaggagttaatgatttctaggttcatggcttgcctagcttctacgagtaagcgccatcacgactcccgaggataaggaaatccgggtcgtagcattcactcacaaaaattactaaaaacaaagtttacccttctcccaaaagtaaatttcatatttggctccacataatgtgttcaatgagtcaagtgaagtacttttcattgacaaaaaaaagttgctgaaaaatgcatatctcatattttttttttttagagaaatcccatttcttgcctaaacgaaatgcctataaaagagcatatatttgcaacaacagtttgcagaaactatcaagtcaaataatcccccctttaattccctcccaaa

SEQ ID NO: 107 - DNA, 1000 bp, Artificial Sequence
  Description of Artificial Sequence: Synthetic polynucleotide
tttacgagtttactatactttagtcgtacagtttgcaataatagtattttaaccacaattagttatatgtacaaaatttcataagtgaataactttttttcaatgacaaaaataagagttgctcaaacaatatcaagttacaaaaatttaattttaactgtaaaagttatatttttccaaaataacataaactatagtaattatatatagtttgaagtattaataaaatttaaatatgcaaaagttaattttaataaaccatttgtatgcctacttgtagcctctaaactattttatttgctttatttatcaaactcatattttattttattgcaccttgttagttttggacgttaattatatatatttggtgtaaaatttaaaatatattaacatttgtggagaatttatgtatgcctggttcttaactattttttttttatataactggttagagtaatttcttatatttcagtatttatttttaaataagtcctcataaattgaagactttaaaagtttttgtgtcattcctctttttatttaagaaattgaagaattccgctaaatttcatattccgctgttatttaactgtttattcccttgttaatataattggtaagaagttttaaaataaaggagttaatgatttctaggttcatggcttgcctagcttctacgagtaagcgccatcacgactcccgaggataaggaaatccgggtcgtagcattcactcacaaaaattactaaaaacaaagtttacccttctcccaaaagtaaatttcatatttggctccacataatgtgttcaatgagtcaagtgaagtacttttcattgacaaaaaaaagttgctgaaaaatgcatatctcatattttttttttttagagaaatcccatttcttgcctaaacgaaatgcctataaaagagcatatatttgcaacaacagtttgcagaaactatcaagtcaaataatcccccctttaattccctcccaaa

SEQ ID NO: 108 - DNA, 1500 bp, Artificial Sequence
  Description of Artificial Sequence: Synthetic polynucleotide
accagaatcaccatacaaagctatttccagactcggaatcccaaatagacatcaatagcactgaaatgcacttcaacccaatcgtatgaaattcttccaaaaaggctaacttccacaataagtgccaaaacgatctcgggtaattccaaacccgatctggacacacacccaagtccaaaataatcatacaaacctgttaaaacattcaaatcccgattccgaggtcaattactgaaaaatcctatcctagttaattcttccaactaaaagcttccaaaatgagaattctatttccaaataaactctgaacttcccggaattcaattttgactatgcgtacaagtcataatacctgaattgaagctgcagatagcctcaaatcgctaaacaacgtgctaggtctcaaaacgccctgtcgggtcgttacattataggtgattaactacgtatatacttgtgcaagtgttctatcataattcaggccaactagtaagagtagaaacaatgaatggcacataacaaacgatcaccacgaaatgtacatgatataactcacacaaggtaggcacgctactagacaattaccaataacaacaatgcctaggacatcacaagatatgacaaatcaatccttactatcacggttgagttgtaacgtgcaagaatatttcactctttttagggcactaagatcactccaccaacatttcaagagaatccctggcactgctaaaaagccctctacactgtagtgaatttttcttagttatctaaagttaattattcatttagtattctttacattaggttcccccttctaggtcctgcacgtaactagattgaatggattggtccactctattattatagagtaattattaaatttttatttgactaggcatcactagttgcactatcaacaaagtattagttctagccttctgggtacttcatacctatgcaaatgataattttattaaaacaatagatgtacatggatataaatacctatgaaaattaaataaattataactaagaaaaaaactttaaagttcactcctaagatatcgggttattacatgaccaaacacaatttgtttatcaaatactttcaaaagaatttgccaaacgtaaattatttttctccaaagtgacttatgaattactatgttgataaaatacttttcaaagtaactaatgtttagaagtcaaggatgggcttcttttgattattgaagtttgtagcaattgtatgtagttatagtcagggtgaccaccagcatctcatatagcaatacacaagtggattagcgcattttaaatttcaattagttcatgcaaatatacacgtaatagcattataagccactttcacaacaggcagattagtggttttgaaatttcaaccaatgatatatactataaattgatcaagcacaaaccttaattgagcaacacaatttcttacagcaataactatcacatataacaataactgcc

SEQ ID NO: 109 - DNA, 500 bp, Artificial Sequence
  Description of Artificial Sequence: Synthetic polynucleotide
ataaatacctatgaaaattaaataaattataactaagaaaaaaactttaaagttcactcctaagatatcgggttattacatgaccaaacacaatttgtttatcaaatactttcaaaagaatttgccaaacgtaaattatttttctccaaagtgacttatgaattactatgttgataaaatacttttcaaagtaactaatgtttagaagtcaaggatgggcttcttttgattattgaagtttgtagcaattgtatgtagttatagtcagggtgaccaccagcatctcatatagcaatacacaagtggattagcgcattttaaatttcaattagttcatgcaaatatacacgtaatagcattataagccactttcacaacaggcagattagtggttttgaaatttcaaccaatgatatatactataaattgatcaagcacaaaccttaattgagcaacacaatttcttacagcaataactatcacatataacaataactgcc

SEQ ID NO: 110 - DNA, 1500 bp, Artificial Sequence
  Description of Artificial Sequence: Synthetic polynucleotide
  modified_base (1189)..(1189): a, c, t, g, unknown or other
taatacttattttgtaagaattgcaatattgttatttttgttatggacttaaatattaaccatgttataatcttaagtttatattattagaaaaacttagtttttgaaagactaatatgaacattagtacttatttcaaaaataagcacctagatatatgaaattactttaagtacttatttaaaataattaagtaccacacatacatacatatctctacaaactgttaaagttttctatatgagtacttattttaaaataagagcttaaatataataaattatgttaaatttcttatttaaaataataaaggaccaaacatgcataaaataaagtatgagcttaataagtcaagaagctaattgataagcattgatgccaaatgcacttactaacttttctatattgtaggaaaaatctaacttttatatttaaaatttatttttgtaaaacttctctaatttttggacaaactcttatattgattttttaatcaaagccaaaatatttatttaactatgaaaaaattttaacaactaatttattatggtaaataatattgatatggtaacttcaagcacatgacaaaaattataactaactgcagaagtttattgtctctctgaatcttgtggctatatcataacaaatacttgtagctaataagccaacgatgttctcggtttcatataatttgaattttaaaatagtttttaaatttaatatttatttcaaatcattattgtggctaacatgttataatcgcagtaatatttggagatgcaatacttatatttagctacaaaattttattgtatcagaataagtttgtagctattaagttagtttttgccacaaatttttataattgaagcaaaaatacctattcagctacagtattttgtatcgagtaatattttgtgactagaagattaatattgctacagtaatttcagacgtgtggcaaaaactcataattagctacaaaatattgtcgtagcaataattttttatatctattaatgcaattattactacatgcttttataacttgaggcaaaaatatctaatagctataacattttgttagaagtaatttttgtggctataaaattggtattgctacagtaatttcaaatgcgtggcaaaaaaatacgattaactacgaaattttattgtagcaataacntattgtagcaataaatttgtagctatttgggtaatattgctacgacagttagcaattatagcaaaaatgctaaattagctttgttaatttaattttgtagctaaacttttttatgaaattttaatttttgtggctattgttaggtattagctacaattttcatatatgtagctaagaatttgtagctatatatacataatgttgtagtggcaaattctaacattgtacgcttggctgcccttttttttttggctacaaaactctaaagtaaaggaactagaaaactcgtttggcgagagaaagagagagag

SEQ ID NO: 111 - DNA, 500 bp, Artificial Sequence
  Description of Artificial Sequence: Synthetic polynucleotide
  modified_base (189)..(189): a, c, t, g, unknown or other
caataattttttatatctattaatgcaattattactacatgcttttataacttgaggcaaaaatatctaatagctataacattttgttagaagtaatttttgtggctataaaattggtattgctacagtaatttcaaatgcgtggcaaaaaaatacgattaactacgaaattttattgtagcaataacntattgtagcaataaatttgtagctatttgggtaatattgctacgacagttagcaattatagcaaaaatgctaaattagctttgttaatttaattttgtagctaaacttttttatgaaattttaatttttgtggctattgttaggtattagctacaattttcatatatgtagctaagaatttgtagctatatatacataatgttgtagtggcaaattctaacattgtacgcttggctgcccttttttttttggctacaaaactctaaagtaaaggaactagaaaactcgtttggcgagagaaagagagagag

SEQ ID NO: 112 - DNA, 1839 bp, Nicotiana sp.
atggacgtggcaatatctaccaacgtatggatgctgcacatggccacctccaaaatacctccgccaccagcagctacttgtttaatttcctctttcagccgagaaaagccgtcacttgtatcaaaagccagctgcttctctaccgcagctgcaggccgcagcatgaaaactgaaccatcacctaatcagtactctgctatttcatcttcagatcaaaatctctctagacgttcagggaattaccaacctaccatgtgggattttgagtatattcagtccatacacaatgattatgcgggagataagtatatgaagcattttaacgaactgaaggaggaaatgaagaagataataatggctgagggattagaagaattagagaagttggagctgattgataatttgcaaaggcttggagtaagttaccacttcagggacgaaattatgcaaattttgagcagcataaaccagcacagtacttcagcagattcattatatgccacagctctgaaatttaggctcttgagagaacatgtatttcatatctctcaagatatattcaacaacttcaaggacgaaaatgacaatctcaagcaaagtatttgtaacgatacaaaaggtttgttacaattatatgaagcatcatttctcgctacagagactgaaaccactttaaactatgccacaagattcacgacgacacatctaaagaattatgttgacaatcattgtggtgatgaagaaaatctaatggtcgcattagtacaacatgccttggaacttcctaggcattggatgatgccaagattagagacagagtggtatttaagcatttatgagagaatgtcaagttctaatcctctgttgcttgagcttgctaagttggactttaacattgttcaagcagcacaccaaaaagatttgagaattctatcgaggtggtggaagagcacatatttagcagagttgtcattttcaagggatagagtagtggaggctttcttttggacagtggggttactatttgagcctcaatacagctactgcagaagaatgttaacaaaggttatagtttttattgtagtcctagatgatatttatgatgtttttggcagtcttgacgagatggaaatccttactgatgctgttgaaagatgggatataaaagcaatggagcagcttccagactatatgaaaatatgttaccttgcactcttcaacagtaccaatgaaatggcgtatgatattctcaaagagaaagggatcaatgtcctaccctactttacaagacaatgggcagatttatgcaaagcttacttacaagaagcaagatggtactacaaagggtataagccaactctggaagaatacatagataatgcatggatttcaattgcaactcctttgatattagtccatgcattcttctttgtcaccaatccaattacaaaagaggcattggagtccttaaacaaatatcctgacataattcgtcggtgtgctataattaatcgttttcttgatgacttggggacatcatcggaagagttaaaaaggggtgatgtttccaagtcaattcaatgttttatgaatgagaagggtgtttccgaagaagaggcaaaagaaggaattagaattttgataaaggagacatgggaactgatgaacaaagaccaaatggaagagctactattttctgaaacatttattgggattgcattaaatttttcaagagcatcacactgcatgtatcagcatggagatgggcatggaattcaaaattctcacatcataaatcggatttccaaactactttttgagcctatcacaattctatag

SEQ ID NO: 113 - DNA, 1092 bp, Nicotiana sp.
atgagtctttctacagcaattacaacatggggcaacacccattttgcccttggaaataacggcagatccagattttcctctcatggattcttgcttcctaatctgaagatcaaattctataccaacaacccttctcctctttctatctcagctcttcttacaacaaaacaacaaactgatgaaagcaagaacaagaaaaaacaagcaatggagttcaatgaatacgttcttgaaaaagctaattctgtgaacaaggctttggaatcttcagtcttgattaaagacccagtcaagattcatgaatccatgagatattctcttcttgccggtgggaaaagaatccgacccatgttgtgtatagcctcttgtgaacttgttggtggagatgagtccacagctatgcctgcagcttgtgctgttgagatgattcacaccatgtctttgatacatgatgatcttccttgtatggataatgatgatcttagaagagggaaacctacaaatcacaagatttatggcgaggacgttgctgttttagcaggggatgcacttcttgcattagcttttgagcacattgctactcaaacaaaaggggttccttcacataggattgtaagggtaattggtgagttagctaaatgtattggtgctgagaggcttgtagctgggcaagttgtagatataatttctgaggggatttctgatgttgatttgaagcatttagagttcattcatttgcacaagactgcagctttattagaagggtcagtggtgttaggggctatattaggaggggcagatgctgaagaagtggagaagttaaggaagtttgcaaggtgtattgggttgttatttcaagttgtggatgatattcttgatgttacaaagtcttctcaacaattggggaagacagcagggaaagacttagttgctgataaggtaacttatcccaaactgattggtattgacaagtctagggactttgctgaggagttaaacaaagaagctcaagctcagcttgctggatttgatcaagagaaagcagctccattgattgctcttgcaaattatattgcttatagagaaaactga

SEQ ID NO: 114 - DNA, 1689 bp, Nicotiana sp.
atgagtcatttgaagatgagtgcagcaatggatgatagtactttcagcagtagtagtagtactactaatactgaacgcccattggcaaattttcactcaagtgtatggggagactatttcctctcctacactcctcaactcacggaaattagtagtcaagaaaaagttgaatttgaagagttgaaagaaaaagccaggcaaatgttagtggaaacacctgataatagtacacaaaaacttgaattgattgatataatccaacgattgggagttgcatatcatttcgaaaatgagattcaaacatccattaagaacatctttgatgcgtcccaacaaagtaaaaatgaagatgacaacctttgtgttgttgctcttcgttttcgactaacaagacaacaaaggcattacatgtcttctgatgtgttcaagaaattcaccaacaaagatggaaagttcaaggaaactcttaccaaagatgtacaaggattattaagtttgtatgaagcagcacatctaagagtacatggggaagaaattcttgaacaaggtctgaattttaccatctctcatttaaagtccatggcccctaaattgagcaactcactcaagtctcaaattagtgaagccttaagtcagcccgttcatattaatctaccaagatttggagcaaagacatacatgtctctgtatgagaacgatgaatcacataatgatttgcttttgaaatttgcaaaattggattttaacattgtgcaaaaggtgtaccaaagcgagctttacgagcttacaaggtactggtggaaagatctggattatgcaaacaaatttccatatgcaagagacagattggtggagtgttactatggggcagtgggagtgttatttgagcctcaatatagtcgtacgagaaaaattttaggaaaattaatcaatatcataaccatggttgatgatacttttgatgcttatgcaacctttgacgaaattgtggctttcacggatgcgatgcagagattggacattagtgccattgattcagtaccggtcaatttgagaccctcttatcaagtcttagtagattttttcaatgaaataggacaagaactggcaaaagaaggtaaagcagatcgtgtctactatgcaaaatttgagatgaaaaagtggatcagagcctatttcaaggaagcccaatggttgaatgctggctatattccaaaatgtgatgagtatttggaaaacggaagtgtaagtgttggcattacgctgattgcagtaacttctttggtttgtttggaggaacttataaccaaagaaactttagaatgggtgataaatgatcctttgattcttcgaacttctggagtaataagcagattaaaggacgacattattggacacgtttttgagcaaaaaagaggacatgtagcttcattcattgaatgctacatgaaagaatatggagcttcaaagcaagaagcatatgctgcggctgaaaaggaaatggctaatgcatggaaagatataaacacggaattcctccgcccttctcaagtatcaatgtttggcctcgaacaaattataaatcctacgcgcctggtaattggtttccaggagaatgattttataaatactcaaggcgaatataaagacaaaatcacctcgttgcttgttgactccgtgaaaatatga

SEQ ID NO: 115 - DNA, 2040 bp, Nicotiana sp.
atgttgaattcgatggaggatggaaggttaaatgtcttagcctatgacacagcttgggtttcctttattccaaatactactaataatggaaatgatcaaagacctatgtttccatcttgtcttcaatggattatagacaatcaactttctgatggttcatggggagaggagattgtattctgcatatatgatcgactcttgaacacactagtatgtgttattgcattgacattatggaacacgtgccttcataagagaaacaaaggtgtgatgtttatcaaagaaaacttaagcaagctagagacaggggaagttgaaaacatgactagtggatttgaacttgtgtttcctactctccttgaaaaagctcaacaactagatattgacattccgtatgatgctccagtcttaaaggatatttatgcaaggagagaagtaaagttaacaagaattcctaaagatgttatccatacgattccgacaacagtattgttttcattagaaggattaagggacgacttagactggcaaagacttttaaagcttcaaatgcctgatggttcattcttaatatcccctgcttccactgcctttgcattcatggaaacaaatgatgaaaagtgtttggcatatcttcagaacgttgttgaaaagagtaatggaggagcgcgacaatacccgttcgacttggtaacacgactttgggcaattgatcgattacaacgccttggaatctcttattattttgcggaagagttcaaggaacttttgaatcatgtgttcagatactgggacgaggagaatggaatttttagtggaaggaattcaaacgtttctgatgttgatgatacatgcatggctataaggttgctaaggttacatggaggtgaagtggacgggtcaccaacacatatgtttaatctctatagatgttcccaagttttattcccaggagaaaagattcttgaagaggcaaagaattttacttataacttcttacagcaatgtcttgcaaacaaccgatgcttagacaaatgggtcatagctaaggacatccccggggagataaggtatgcactagaatttccatggtatgccagcttacctcgggtggaagctaggtattatatagaacagtatggcggagcagatgatatttggattggcaagacgttatacagaatgcccgatgtcaacaacaatgtttatttacaagctgcaaaattggattacaatagatgccaaagtcaacatcgctttgaatggctgattatgcaagagtggtttgagaagtgcaactttcaacaatttggaataagcaaaaagtacctcctagtttcttatttcctagctgctgcaagtatatttgaagtcgagaagtcaagagaacgccttgcatgggctaaatctcgtataatatataagatgattacatcttactacaatgatgaagccacaacttggacaactaggaattcattgctaatggaattcaaggtttctcatgatccgaccagaaaaaatggtaatgaaacaaaagagatcttagttctcaaaaatcttcgtcagtttttgcgccaactatcagaagaaacttttgaagacctaggcaaagacatccatcaccaactacaaaatgcttgggaaacgtggttggtgttcttgagggaggaaaagaatgcatgtcaagaagaaacagagttgctggtgcgcacaattaatctctcgggcggctatatgacacatgatgagatattattcgatgcggactacgagaatctgtccaaccttaccaataaagtttgtggcaagcttaatgagctccaaaatgacaaggtgacgggcggctcaaagaacaccaatattgaactcgacatgcaagctctcgtaaagttagtgtttggtaacacctcaagcaacatcaaccaagacattaagcaaacattttttgcagttgtgaagactttctattacagtgcgcatgttagtgaggaaataatgaactttcacatatccaaagtgctttttcagcaagtctag

SEQ ID NO: 116 - DNA, 1824 bp, Nicotiana sp.
atgtcttctctctgttcaaactctgcaacttctcttagttgtaataactccttccaatccaaaaatcctcttcttcacaccatctttaacttctttccttcaatcaaaccacactcttgtttcccatatacagttatccggtgctcaattcaaaagcgacctgaatatataccgagtaaaatctccgaccacaaatacgtacgcattttcgacacgactctccgcgatggagagcaatccccgggcgctacgatgactacgaaagaaaaattagatgttgcccgtaaattagcgaaactcggagttgacataatcgaagctgggtttccagcttcatctgaagctgattttgaagctgtgagattaatagcagaggaaattggtaataatagcgacggtgattatgtgccggtgatttgtggattagcgaggtgcaataagagggatattgataaagcgtgggaagctgtgaagtgtgcgaagagacctagggttcatacgtttatagcgacgagtgagatacatatgaagtataagttgaagatgagtaaagaagaagtagtggagaaagcgcggagtatggttgcttatgcgaggagtttgggatgtgaggatgttgaatttagccctgaagatgctggaaggtctgagcgtgagttcctttaccatatccttggagaagttatcaaagctggtgcaacaacccttaacatacctgatactgttggatacactgtgcccactgaatttggacaattaattgctgacataaaagccaataccccaggaattgaaaatgtgatcatttctacacactgccagaatgatcttggactttctactgccaacactttagctggagcttgtgcaggggcaagacaagtagaagtgaccatcaatggcattggtgaaagagctggaaatgcttctctggaggaggttgtaatggccttaaaatgtcgcggagagcaagtattaggtggcctctacacggggattaatagtcaacacattgtcccgacgagcaaaatggtagaggagtacactgggcttcaagtgcagccacataaggccattgttggagctaatgcatttgctcatgaaagtggcatccatcaggatggaatgttaaaacacaaagatacctatgagattatatctcctgaagatattgggcttaatcgtgctaatgaagccggtattgtccttgggaaactcagtggacgccatgcattgaaatccaaaatgcttgagcttggatatgacattgagggaaaagaactggaggacatcttctggcgatttaagtcggtggctgagaagaaaaagaaaattacagatgatgacataatagcactgatgtcagatgaaattttccagcctcaagttgtttggcaacttgcagatgtacagattacctgtggaagtcttggcctctctacagcaactgttaagcttattgacagtgatggtcaagatcatgttgcttgttctgttggaaccggaccagttgatgcagcttataaggcagttgacctcattgtaaaggtacctataacactcctcgagtattccatgaatgcagtcacagaaggtatagatgccatagcctcaaccagagtgttaatccgcggggaggatgaccatgctataaccaatggttcaattggaccgactcttcaccgtacatttagtggaactggagctgatatggacgttgttatctctagtgtccgagcttatattggtgcattgaacaaaatgttgagtttcgggaagctggtttccagatacaagaagcctgaaggtagtgtggtagtataa

SEQ ID NO: 117 - DNA, 1824 bp, Nicotiana sp.
atggacatggcaatatgtaccaacgtatggatgctacacatggccacctccaaaagacctccgtcatctacttttttaattttctcttttagccgagtaaagccaaaaaccagttgtctctctaccgcagctgcaggcggcatgataactgaaccatcaactaatcagtactctgctatttcatcttcagatcaaaatcccactagacgttcagggaattaccaacctactatgtgggattttgaatatattcagtccatacgcaataattatgcgggagagaagtatatgaagcgttttaacaaactgaaggaggaaatgaagaagttgataatggctgagggatcacaagagttagagaagttggagctgattgataatttacaaaagcttggaattagttaccacttcaagcatgaaatcatgcaaattttgaggaccataaacctaaatgcagctacaggagattcattatatgccacagctctgaaatttaaactcttgagagaacatggttttcatatctctcaagacatattcaacgacttcaaggacgaaaatgacaatctcaaggaaaatatttgtaaggacacaataggtttgttacaattatatgaagcttcgtttctcgctacagaaactgaaaccactttgaaatatgcaacaagattcacagcggcacatctgaagaattatctaggcaatcattgtgatcataaagacaatcgaatggtcgcattagcgcaacatgccttggaactgcctaggcattggatgatgccaagattagagacacagtggtatataagcatttacgagattatgtcaaatgctaatcctctgttgctcgagcttgctaagttggacttcaacattgttcaagcagtacaccaacaagatttgagaattctatcaaggtggtggaagagcacatgtcttgcagaaaagttgtcattttcaagggatagactggtggagaatttattttgggcagtggggatagaatttgagcctcatcacagctacttccgaagaatgttgacaaaagtcattgcttttgttggaataatagatgatatttatgatgtttatggcactcttgatgagttggaagtcttcactgatgctattgaaagatgggagataaaagcgatagagcaacttccacactatatgaaagtatgttaccttgcactcttcaatattaccaatgaaatggcgtacgagattctcaaagagcaagggatcgacgtcctaccctaccttacaaaatcttgggtagatttgtgcaaatctttcatacgagaagcaagatggtattacagtggatatgtgccaactctggaagaatacatggacaacgcatggatctcaattgcagttcccatggtattagttcatgcatttttcctcgtcacaaatccagttcccaaagaggcattggaatcattaagcaaatatcctgacttaattcgctgctctgctacaatttttcgtcttgctgatgatttagcgacatcatcggatgaattgaagaggggtgatgttcctaagtcaattcagtgttacatgaacgaaaagggtacttccgaagaagaggcgagagaacacatacgtttctgtattaaggagacatgggaacggatgaacacaactcaaagggaaaactcgttattttctgatacattcgtcgaaattacaaagaatatcgcaagaacagcacattgcatgtatttgcatggagatgggcatggaattcaaaatggcgaagttaaaaatagtatctccaaaatactttttgagcctatcactccattatattaa

SEQ ID NO: 118 - DNA, 1530 bp, Nicotiana sp.
atggagacacaacacttccctttcattttcatttcactcttgatattcctttctttcatctttcgatttgttctgatacggaagaattcaagaatcgttaccaaaagattgcctccagggccatggagtctacctttaatcgggaacttgcaccaattaatgaatggtcgccttccaatacatcatactctcagaagtctatcgcaaagatatggaccgatctttcacttatgtcttggcgaaatatcgattattgttgtatcttcacctgagatggcaaaagaaattatgaaaactcaagaccttcgctttgctactaggcctgaatttatgtctggagatattattttctacaattatacagacattggaacttgtccatatggtgaatactggagaaatatgcgcaaagtgtgtgtcctggaacttcttagtgcaaagatggtcaagtcatttaattcaattcgacaagaagagatgtcaagtctcatttcatcgattaattcaactcctgatgactcattgatcaacttatcagacaaaatgttttggtttacaagttctgtaacttgtagatcagctttcgggaaagtgattcatgatcaagataagttgataatgttggtgaaagacgtaacattattagctggtggatttgacttggctgatttgttcccttcccgaaaatggcttcacgagatcagtggattgaagtccaaaatgttgaaagttcacacaaaaatagatgtaattttggagaatatcattaatgagcatcggaataatcgaaaaattggtaagaagggcaatggtgagtctggaggtgaagatttgatagatgttctactacgagtcatggagagtggcgaattgggaactccaatcacaaataagaatatcaaaggtgttattttcgacatgttcttagcaggagcagaaacctcatctacaacaattatttgggcattggctgaaatgataagaaatccaaatgttatggctaaagcacaacttgaagttagagaagtcctaaaaggaaagagaacatttgaggattctgatatagaagagttgaagtatctaaaattagtgattaaagaaacattaaggttgcaccctcctattcctctattactcccaagagaatgcagagaagaaacaaaaattgaacaatacacaatacctatcaaaactagagtcctagtgaatgcttgggccattggaagagatactagatattggcatgattcagaaagttttatacctgagagatttgagaataattctattgatttcaaaggaaatcactttgaatttattccgtttggtgcaggacgaagaatgtgtccaggtttattattcggtttagttaatgtaggacatcctttagctcaattgctttatcacttcgattggaagactcttcctgggataagttcagatagtttcgacatgactgaaacagatggagtaactgccggaagaaaggatgatctttgtttaattgctactccttttggtctcaattaa

SEQ ID NO: 119 - DNA, 2376 bp, Nicotiana sp.
atgatacttggctacagaagcaatatcatactaccattttctcatcatagtttggaaaatggcaaattaggttcatcgaccagaaatacaatttcccagagaccatgtagaggagtaagatgcagctacagtattgcttcatcactggatggtttcgaagaggcaaaggagagaataaagaaaacatttcagaaagtagagttatctccttcttcttatgatacagcatgggtagctatgataccttcaagaaattctgtaaaccagccatgttttcctcagtgtttggattggattcttgaaaatcaaagagaagatggatcttggggattaagtcctagccattcattgcttgtcaaggactcactttcttctactttagcatgtttgcttgcccttagcaaatggggagttggagataaccaagtccaacgaggccttatctttattgaaaagcatggttgggcagttgataacaaggatcagatttcacctgttggatttaggattttatttcccagtatgatcaaatatgcagaaaaaatgaacttaaatctgcctttgggtcctgacattgtaaatctagcgattagcaaccgagatttagcaattgaaagagcgttacagagtgatttcaaggggaatgtttcaaatcttgaatatatggctgaaggacttggtgaattatgtcaatggaaggaactaatggtacatcaaagagaaaatggatcactatttgattcaccagccactactgcagctgccttgatttacaatcaacacgacgaaaaatgctttgaatacttgaattcaatcttgaaactacacaaaaattgggttccgactatctacccaacgaagatacattcgttgctttgcttggttgatacccttcaatgtgtaggagtagatcggcattttaaaacagaaataaaagatgttttagatgaaatttacaggctttggcaagaaaagaacgaagaaattttttcaaacgttgcccattgtgctttggcgtttcggcttttacggatgagtaactatgaagtctccccagaagaactagttgaatttgtcgatgaagtacatttcttttcaacaagtgggagatttacgagttattttgaaattcttgagctccacaaagcttcacagttggctatttatgggaaagatcacattttggataaaattaataattggacaagatcttttatggagcaaaaactcctaaccaatgactacatcgacaggatgtcaaaaaatgaggcagagtttgctttgaggaagttttacgccacatatggtcgagtggaaaatcaacgatatattgaggcatatgagatgatcaattttaaaatcttaaaagccgcttacaggtctcccaatattaacagcatagatttactaaggttctcaaagctggattttaacttgtgccaagcccaacatcaacaagaacttcaacaactcaagagactagaccaagtgggattgccacaacagaatttgtacactaatttcttcctgactgctgctttacttttcgaacctgaattttctgacgctcgtcttgcatgtgtaaagagcaccatgcttcttactttagttgatgattttttcgatggatttgttggcaaagatgaattgctcaacatctttgaattagtagaaagttgggatggtaattactcaacagtgcaatttcattcagagagggtaaaagttttcttttcagcactttacaaaactatagaggagcttgcagcaatagcaaatattaagcaaggtcaatgcatcaaagatcactttataaacttgtggcttgatttgttaaagaatatgatggtagaatttgagtggtggagaaatcagacaacaccaagcatagaagagtatttgtctgtggcctgtgaaactattggtgttagatgcattactctcataacacaatgtcttcttgggccaaaactatcaaaggatgttttacagagttctgaaatgagtgccttgtgcaattgtaccagtatggtggcaagactccttaatgatgtaggatcttacaagagagaagaagcagagagttcaccaacaaatatagtctctatattaataaatcagagtaaaggaacaatctctgaagaagaagctataaaacatgcaaaggaaatgctggaaaataagagaagagagttgctggggatggttctaactcaaagaaagggaagccaattgccacaagtgtgcaaggatattttttggaagacatgtaaatcgtcttatttcgcatattcagatggcgatgagtttcgctttccagaggaaatattgaagaatcgtatcaatgaactactttttaaaccactcaagtcgtaa

SEQ ID NO: 120 - DNA, 1488 bp, Nicotiana sp.
atgtcgttttttgcagttattccattctttctatttgtgttttttattttcagattatatttcccctcatccaaaaccaagaaaaatcttccaccatctccatcaaagcttccattaatcggtcacttccacaaactgggcttacagcctcaccgctccctacaaaaactatcaaatgaacatggttccatgatgatgcttcagttcggtagcgtacctgtgcttatcgcttcatcagctgaagctgcttccgaaatcatgaaaacccaagatttgtcttttgcaaacaaacccatttcaaccattcctagcaagcttttcttcggcccaaaggacgttgccttcaccccttatggggattactggaggaatgccagaagcgtttgcatgcttcagcttttgaacaacaaaagagttcaatcttttcgaaagataagggaagaagagacttctcttcttctccagaggattagggaatcgccaaatagagaagttgatttgacggagctgttcgtctcaatgaccaacgacatagtttgcagggtggccttaggaaggaagtattgtgatggggaagaagggagaaagttcaagtctttgctgttagagtttgtggaattgttgggagtttttaacatcggagattacatgccttggcttgcatggatgaatcgtttcaatgggttgaatgccaaagtggataaagtggcgaaagagtttgatgcatttttggagggtgtgattgaggaacacagaagaaaaaataagaagtcagacactgaagctgaaggggcagacttcgtggatatattattgcaggttcagaaagaaaacaaggctggttttcaagtcgaaatggatgcaatcaaagctattatcatggatatgtttgctgcgggaacagatacaacttccacacttgtagagtggacaatgaacgagctcttaagaaatccaaaaacactaaataagttgagagatgaggtgagacaagtgactcaagggaagacagaggtaacagaggatgatttagagaaaatgccatatttaagagcagcagttaaggagagttctaggctacactctcctgtgccgcttcttcctcgagaagcaattagggatgcaaaggttttgggctacgatatagctgcagggacccaagtcctcgtatgtccatgggcaatctcaagagatccaaacctttgggaaaatccagaggaatttcaacctgaaagattcctggataattccatagattacaaaggcttacatttcgagttaattccattcggtgcaggtcggaggggttgtcctggcatcacatttgctaagtttgtgaatgagctagcattggcaagattaatgttccattttgatttctcgctacccaacggagctaagcctgaggatttggacgtggatgaagctgctggaattactgttagaaggaagttcccccttttagccgtggccactccacgctcgtga

SEQ ID NO: 121 - DNA, 786 bp, Nicotiana sp.
atgcaaaagcttgaaggcaaagtggccatagtgacgggtggtgccagcggcatcggggaagcagcagcacgcctttttgcccatcacggcgcacgcgttgtcatcgcggacatccaagatgaaaagggcagagctttggcggaatccatccctttacagaggtgcagctacgtgcactgcgacgtcagtgatgaaactcaagtgaaagccatggtggattggacggtccagaaatatggtcaactcgacatcatgttcagtaacgcaggagtcgttggtaactccggtcaaaaggtactcgatcttgatctatccgaattcgaccgtgtgttaagagtcaacgcacgaggcatggcagcgtgcgtgaagcacgcggcacgagccatggtggagaagcgcgttagagggagcatcatttgtacagccagtattgcggcaagcagggcaggaccatggcggacggattatgtaatgtcgaaacacgctgtgttaggactaatgagatcagcttcaaggcaattaggtgaatatggaataagggtgaatagtgtttcgccatctgcagtaatgacgccaattatgttgagtgcggagcaggagacatcaatgaaggttctgaaaatgtatgggaatttgactagtttgaagggaattacactaacggtgaagcacttggcggatgcagttctgtttctagcttcagatgattctgcatttgtgagtggccatgatttggtggtggatggtggcttgctctgtcttccatctccaaatagttcattatga

SEQ ID NO: 122 - DNA, 1641 bp, Nicotiana sp.
atggatcttaggaggtcaggaaactacaaacctagcatttgggaagatggatatgtccaatcacgagctacattttacgctgaagagaaacattatgaacgagctgccggactaaaagaagaggtgaggagaatgctagagaaaacgatccacccattggaactacttgagctcgttgacattttgcaaagacttggtttgtcctatcactttgaggaagaaattgatagagttttgaagcaaatgtacgttaatttttgtactacaaatagaaatgatgggcagaagagcgaagatttgtatgctacagctctagaatttcgactccttagacaagagggctatcacgtccctcaagagatgttttacgctttcatggataaggaagggaagttcaaaacaagccttgttgtggatactaacggactgctgagtttgtatgaagcttgctatctttgtatggaaggtgaaagcattttggaaatagctcgagatttcaccactcattttctcacggaaagccttaacaagaagacagataagaatcttgctgagcaagtaagccatgctttagaaatgcctttacattggaggatgcagaggctagaagcaagatggtttatagaagaagtttatcacaaaagagagaacatgaatcctcttatacttgaacttgcaaagttggactacaacatggtacaagctacatacttggaggaactaaaacaaatgtcaaggtgggataagaacattaaacttgttaaaaagatgagctttgttagggacagattggtggagggctttttatgggctgttggtttcactcctaatcctcagtttggatactgccgaaagttttcaacaaagctttctgtattcctcacaacaattgatgacatctatgatgtttatggcaccatggatgaacttgagcttttcactgatattgttgacagatgggacatcaatgcaatagagcgactacctgactacatgaaaatctgcttcctagctctcttcaactccatgaatgaactggcttatgatattctcaaagaacaaggcttcagcataatttcacatataaggaagcagtgggctaacctatgtaaagcctacttactggaagtgaagtggtaccagagtagatacacaccaagcttgaatgagttcctgagaaatgcatggataacaaacactggtcctgtactaataatgcatgcttatttttgcatcacaaaccccataaaggaggaggaactggaatgcttaaagaattatcctgctattattcaatcgccttcgctaattcttcgtcttgcaaatgacttggcaacttcacctgatgaaatcaagaaaggggattatcttaaatcaatccactgctacatgcatgagtcaggaaggtctgaagaaaatgctcgaaactatataaagcaattaattgatcagacctggaagaagatgaacaaagatattctaagggacagctccttctcaaaggattttagaacaactgcaatgaatcttgctaggattgctcaatgcatgtaccagcatggagatggatttggaattccagatcgtgagacaaaggatcggatccgctccttgttctttgagcccattcctctttcatga

SEQ ID NO: 123 - DNA, 1386 bp, Nicotiana sp.
atgcttcatatgattggtggagaaccacaccatgtccttagagatttagccaaaaaatatggaccacttatgcaccttcagttaggtgaaatttctgcagttgtggttacttctagggagatggcaaaagaagtactaaaaactcatgacatggtttttgcatctaggcctaaaattgtagccatggacattatctgttataaccagtccgacattgcctttagcccttatggcgaccagtggagacaaatgcgtaaaatttgtgtcatggaacttctcaatgcaaagaatgttcggtccttcagctcgatcagacgtgatgaagtcgttcgtctcattgactctatccggtcagattcttcttctggtgagctagttaattttacgcagaggatcatttggtttgcaagctccatgacgtgtagatcagcatttgggcaagtactcaaggggcaagatatatttgcaaaaaagatcagagaagtaataggattagcagaaggctttgatgtggtagacatcttcccttcatacaagtttcttcatgttctcagtggaatgaagcgtaaacttctgaatgcccaccttaaggtagatgccattgttgaggatgtcatcaacgagcacaagaaaaatcttgcagctggcaagagtaatggtgcattaggaggtgaagatctaattgatgtcctactaagacttaagaatgatacaagtcttcaatttcccatcaccaacaacaatatcaaagctgttattgttgacatgtttgctgccggaacggaaacttcatcaacaacaactgtatgggctatggctgaaatgatgaagaatccaagtgtattcaccaaagctcaagcagaagtgcgagaagcctttagggacaaagtatcttttgatgaaaacgatgtggaggagctgaaatacttaaagttagtcattaaagaaactttgagacttcatccaccctctccacttttggtcccaagagaatgcagggaagacacagatataaacggctacactattcctgcgaagaccaaagttatggttaatgtttgggcattgggaagagatccaaaatattgggatgacgccgaaagctttaagccagagagatttgagcaatgctctatggatttttttggtaataattttgagtttcttccctttggtggtggacggagaatttgtcctggaatgtcatttggtttagctaatctttacttgccattggcccaattgctgtatcacttcgactggaaactcccaactggaatcaagccaagagacttggacttgactgaattatctggaataactattgctagaaagggtgacctttacttaaatgccactccttatcaaccgtcgagactaatttaa

SEQ ID NO: 124 - DNA, 1821 bp, Nicotiana sp.
atggcgtctatcaccgcaaaccatacattttcccgtaaccctaacatctcattgcatccccaaaatcctctcattcaaacccaagctctcttcaacttcaaatcatcaatccccaaatgttcccctattatctgctgcgcaatccgccgtcgacccgactataccccgagccacattcccgacccgaaatacatccgcatcttcgacaccactctccgcgacggcgaacaatctccaggcgccacaatgaccacaaaagaaaaactcgacgttgcgcgtcagttagctaagcttggtgttgacataattgaagccggttttcctgcttcttctgaagctgatctcgaagctgtgaaattaatagcgaaggaagttggaaatggtgtgtatgaagagggacatgttccggtaatctgtggacttgcgaggtgtaataagagggatattgataaggcttgggaggctgtgaagtatgcgaaaaaaccgaggattcatacgtttattgcgactagtgagatacatatgaagtttaagttgaagatgagtagagatgaagttgtggagaaagctagaagtatggttgcttatgctaggagtattggttgtgaggatgttgaatttagccctgaagatgctggaagatctgatcctgagttcctctatcatatccttggagaggtcatcaaagctggggcaacaacccttaacatccctgatactgttggatacactgttcccagtgaatttggaaaattgatcgctgatataaaggccaataccccaggaattggagatgtgatcatctcaacgcactgccagaacgatcttgggctttctactgccaacaccttagctggagcatgtgcaggtgcaagacaagtagaagtgaccatcaatggaatcggtgaaagagctggaaatgcttctttggaggaggttgtaatggccttaaaatgtcgtggagagcaagtactaggtggcctgtatacaggaattaatacacaacatatactcatgtcaagcaagatggtagaggagtacaccgggcttcatgtgcagccacacaaggccattgttggagctaatgcttttgctcatgaaagtggcatccatcaggatggaatgttaaaacacaaagatacatatgagattatatctcctgaagatattgggcttaaccgagctaatgaatctggtatcgtcctcgggaaactcagtgggcgtcatgctttgcaagccaaaatgctcgagcttggatacgatattgagggaaaagaacttgaggacctcttttggcgattcaaatctgtggctgagaagaaaaagaaaattacagatgatgacctgatagcattgatgtcagatgaagttttccagcctcaatttgtttggcaactcgaaaatgtacaggttacatgtggaagtcttggcctttctacggcaactgttaagctcattgacgctgatggtcaagagcatgtttcttgttctgttggaacggggccagttgatgcggcttacaaggcagttgatctcattgtaaaggtacctgtagcactacttgaatattccttgaatgcagtcacggaaggtatagatgccatagcttcaaccagagttttaattcgtggggagaatggacatacatcaacccatgctttaactggagagactgtacaccgttcgtttagtggaaccggagcagatatggatattgttatctctagtgtccgagcctatattggagcattgaataagatgctgagtttcagaaagctggtgtcgaaacacagcagacctgaaggcagtgcagtcgtatag

SEQ ID NO: 125 - DNA, 1248 bp, Nicotiana sp.
atgctatttgcaaggggtttgtctcagatttcgagacgcagtatcaatagatatcaatggctatgtccccagcaacaacaatttcaccattccaatcactttccctctcccatcgatgcttctcataaggttttgggttgcagagtaattcattcatgggtttctaatgctcttagtggtattggtcaacaaattcatcatcaaagcactgctgtagcagaggagcaagtggacccattttcccttgttgctgatgaattatcccttctgacaaacaggctgagatcaatggtagttgccgaggtcccaaagctggcttcagctgctgagtatttcttcaaaatgggagtagaagggaagaggtttcgacccacagttctgctgttgatggcaacggcactgaacgcaccggtacttagaccccaggtggatgttgattctttgtccagggatttgcgtacgaggcagcagtgtatagctgaaatcacggagatgatccatgttgccagcctactccatgatgatgtactagatgatgctgacacacgacgtgggataggttctttaaactttgtgatgggaaataagttagctgtactagctggagactttctgctttcccgagcgtgtgtggcacttgcctctttgaagaatacagaggttgtatcccttctggcaactgttgtggaacatcttgttactggagagacaatgcaaatgacgacttcttctgatgaacgttgtagcatggattattacatgcagaaaacatattacaagactgcatcattaatttcaaacagttgcaaagcaatagcgctacttgctgggcatactgctgaagtctccatgttagcttttgactatgggaaaaatttgggcttggcatttcaattaatagatgatgttcttgatttcacaggcacatctgccaccctcggcaagggttcattgtctgatattcgtcatgggattgtaactgccccaatattgtatgccatggaggaatttcctcaactgcgaacggtggtggaccggggattcgatgatcctgtcaatgtggagattgctctggactaccttggtaagagccgagggatacagagaacaagagaacttgcaagaaaacatgctaaccttgcctcagcggctgttgactctcttcctgagagcgatgacgaggatgttcagagatcaagacgggcacttgtggaacttactcaaagagtcatcacaagaacaaaatag

SEQ ID NO: 126 - DNA, 3060 bp, Nicotiana sp.
atggacgtggcaatatctaccaacgtatggatgctgcacatggccacctccaaaatacctccgccaccagcagctacttgtttaatttcctctttcagccgagaaaagccgtcacttgtatcaaaagccagctgcttctctaccgcagctgcaggccgcagcatgaaaactgaaccatcacctaatcagtactctgctatttcatcttcagatcaaaatctctctagacgttcagggaattaccaacctaccatgtgggattttgagtatattcagtccatacacaatgattatgcggtaatataatttgtttagcacatactcatgttattcaataatctgcataattaatttgccgtaatatcattcaaaagattacgtacgttgatattcgagctgatcatcaattgtaaatgtgttgcgtagggagataagtatatgaagcattttaacgaactgaaggaggaaatgaagaagataataatggctgagggattagaagaattagagaagttggagctgattgataatttgcaaaggcttggagtaagttaccacttcagggacgaaattatgcaaattttgagcagcataaaccagcacagtacttcagcagattcattatatgccacagctctgaaatttaggctcttgagagaacatgtatttcatatctctcaaggtactgattttgccaaactaatttccttcttctttcatgttctgaattttcttattcagaacttgtggtagtcattactgcaatattttcttaaatttccggaaaacaagatctagaattaagataaaattaaaatagagtaggttaatgagaataaatacacccaaaaaaattgaaaatacaccagacttgtctttgatgtgaatttacattgaacctatagaaggaacagttcacataaattaaagcgtcaagagatattttcttttacataattcatgaggagctagccacaatgcaaggagtatctatatatgccaacctttaagatatatggtttcttgtgttgtagatatattcaacaacttcaaggacgaaaatgacaatctcaagcaaagtatttgtaacgatacaaaaggtttgttacaattatatgaagcatcatttctcgctacagagactgaaaccactttaaactatgccacaagattcacgacgacacatctaaagaattatgttgacaatcattgtggtgatgaagaaaatctaatggtcgcattagtacaacatgccttggaacttcctaggcattggatgatgccaagattagagacagagtggtatttaagcatttatgagagaatgtcaagttctaatcctctgttgcttgagcttgctaagttggactttaacattgttcaagcagcacaccaaaaagatttgagaattctatcgaggtaagcctcttaatttcatgttgatactttttgattaatctatttagagtgagccgtaaacgtttattgtggatttaagttatactagcagtgtattttggcctattataatagggctaatagtctaatacatagtaccttattttccaggtttctaattaattccacttaagtattatgattaattatctttgaaactcctaatgtttatcgataaacatgcccggtaattttctcatacatcaattattttcatgaaatataaaggtggtggaagagcacatatttagcagagttgtcattttcaagggatagagtagtggaggctttcttttggacagtggggttactatttgagcctcaatacagctactgcagaagaatgttaacaaaggttatagtttttattgtagtcctagatgatatttatgatgtttttggcagtcttgacgagatggaaatccttactgatgctgttgaaaggtcagtatcttcaaggaagcaattacatctataaatagaagaaagtatatattacccctttgctcgtttttttaatcgtctcaattatattgttttgtgtctgacatgtgaaattttgctttctggtaatataaattcagatgggatataaaagcaatggagcagcttccagactatatgaaaatatgttaccttgcactcttcaacagtaccaatgaaatggcgtatgatattctcaaagagaaagggatcaatgtcctaccctactttacaagacaagtaaattcattatacttagaatctttaactcattctttgtttactacttttattaaaaagttagttatttttggcacgcgcacacatatatttatgctctatctaaaaatatttgggttcagttgaatctgccacctctcctccccaccccctaaaccacaaattaaacaccaaatccatttatttgcattattattatttgagacaatttattaattagtgggcagatttatgcaaagcttacttacaagaagcaagatggtactacaaagggtataagccaactctggaagaatacatagataatgcatggatttcaattgcaactcctttgatattagtccatgcattcttctttgtcaccaatccaattacaaaagaggcattggagtccttaaacaaatatcctgacataattcgtcggtgtgctataattaatcgttttcttgatgacttggggacatcatcggtacgtttttatactttcctttgagataaaatttgtactatgattcaaaataacttaatttagagtccattcggatgaagagacactaagattcaagaagattatacgtaaagcaaattcataatatcgttcatttttttttctattgctcttgttaattcaggaagagttaaaaaggggtgatgtttccaagtcaattcaatgttttatgaatgagaagggtgtttccgaagaagaggcaaaagaaggaattagaattttgataaaggagacatgggaactgatgaacaaagaccaaatggaagagctactattttctgaaacatttattgggattgcattaaatttttcaagagcatcacactgcatgtatcagcatggagatgggcatggaattcaaaattctcaca

SEQ ID NO: 127 - DNA, 1092 bp, Nicotiana sp.; identical to SEQ ID NO: 113

SEQ ID NO: 128 - DNA, 5929 bp, Nicotiana sp.
atgagtcatttgaagatgagtgcagcaatggatgatagtactttcagcagtagtagtagtactactaatactgaacgcccattggcaaattttcactcaagtgtatggggagactatttcctctcctacactcctcaactcacggtatgatactacatactcatatatatgctttataatctttgtgttcttaaactattattttatggaaaattttatgttgaagttattaatctttgaatctttccaaccaacgaaccttttaacgtaatgaatacaatcaaacttctttataacaaccggatttttttttttgctgttatagcaaagtattgttatagataacatatattataacataacatgaaaattggttccataaaaaacttaaattttataatgaatgactgttatatagcgatattgttatagagaggtagtcaaaaaataacataatgcttaacttttggtgcaggaaattagtagtcaagaaaaagttgaatttgaagagttgaaagaaaaagccaggcaaatgttagtggaaacacctgataatagtacacaaaaacttgaattgattgatataatccaacgattgggagttgcatatcatttcgaaaatgagattcaaacatccattaagaacatctttgatgcgtcccaacaaagtaaaaatgaagatgacaacctttgtgttgttgctcttcgttttcgactaacaagacaacaaaggcattacatgtcttctggtatcttatttcttctctatcctatgcagctagcaatattgttagtatatttcttttctttttttaaaaaattattattgttcctggttatttcaatggtgtatttcaactatagctttctctgtccagtacattgaagtcacttttgttaagtcaaaataaatagtgggagtagtatataatatattgacattcatgtcgagtcaaaactcaaaagtaagatatttgaagtgtaggaattttgacctgtcttgtacaaaacattaattagctggtaaactttatttattttattatgttttccaacatgttactcatgaggggttctgattcttttttcttgggtcactagtcactccctttaatcacttttttgagggtgaaatttaaaaatagccagatttagtactagtcattgaaaaatagtcacgtttcgaaagtcatcgaaatatagccactttttatgtaaagataaatttgagcgaaaacactgttcaaaactcggaaaatacgccagtatattatactggagttccagcataagtatgcttgaactccagcatattatactggagttccaggataagtatgctagaactccatcatattatgatgaagttgcagcataagtacactagaactccagcataatataatggagttccagcagtataattgtccagtataatatactggagtttagagtacgtgtgctccagtctcccgtatattttacaggagttggcaaattataccggtccagtaaaatatgctggagttcgtacaaaaatgcactagaactcccgtatattatacgggaccggtccttatatatatatatacttatttattaaattatgtcttcggcacgcacctcatgtgagggtatgtgttggattttgcatttgttactgctgatatttgatttatcagaatcataagtagttaagtcgaatgaggagtctttgtttaaatttaaatttaataggataagttaattgagatagtttaggtttttctaatttgaatatttattctcctgattttctgcagattctgttcttaaattggctatttaaagccttgttatacttaataaaataattgagagactttctccatcaacacttttaatatttttgttgccccatcttttaaaaaaccaacagtatgccgttaactagcttactttttttgacatgaaacaagatgtgttcaagaaattcaccaacaaagatggaaagttcaaggaaactcttaccaaagatgtacaaggattattaagtttgtatgaagcagcacatctaagagtacatggggaagaaattcttgaacaaggtctgaattttaccatctctcatttaaagtccatggcccctaaattgagcaactcactcaagtctcaaattagtgaagccttaagtcagcccgttcatattaatctaccaagatttggagcaaagacatacatgtctctgtatgagaacgatgaatcacataatgatttgcttttgaaatttgcaaaattggattttaacattgtgcaaaaggtgtaccaaagcgagctttacgagcttacaaggtactcattagtcttaacctcttcgatatgacatgaatattgtacttcttcggatgtaatgagatacaaaaattaactgattactaatctgcactataggtactggtggaaagatctggattatgcaaacaaatttccatatgcaagagacagattggtggagtgttactatggggcagtgggagtgttatttgagcctcaatatagtcgtacgagaaaaattttaggaaaattaatcaatatcataaccatggttgatgatacttttgatgcttatgcaacctttgacgaaattgtggctttcacggatgcgatgcagaggtaaagtataatcttatttaacccttgtcattgtctcattattgagtagaaaaagaatgttattccctccgctctattttatgtccggaggaattggacgacgagtaagggtgtacgaatgaaaccgacaaacggcatcaacccgataatgcgagtcaaaacgagaaaaaaaaactgactatgatttggttcgatgttggaaaaaaaaatccgatcatatttgttttggtttggttttaactagaaaaagtcaaaccgaaaccaaaccaacccggtattatatgtatagaagttttaaatatatttaatacataaaatatttattgtagtgtagtttgtaaatatttcttaagctttttcatcattttatcttttcacatattatttcaagtttggaattataatagttggatgctccaataggctttatacttcataaatgttagtaactcaaataaatcctaaaccaatattaaatcaatactaatgttaataaaagacattaaattcaattgtactatgaatgaaaatagtgttggatatttattctttagtttttcagtgatttagatatataaaatgcataacttacttttcttttagtgtttagtcatgtaaataatagtacttattagtcgtacttattttagcaacttaattagtaattttaaattatgtttgttttcgttatggcttataaataatacttattttatgcgattttattatttttattgttgaatatttcagtacaatgccatgactcatctcacatttatgttattttattgaaaaacaacttatatagttctatcttactacgattaaagaagtatttggagcacaaattctatattttgtgttatgaagactttatgaaagaaaatcgagaaaatccgaaaacctgaaaaatccgagaaaaaccgagattgaaaaacccgacatttattggtttggtttggtctttagatttaataacccaatacaattggtttggtttggttattagaaaattcgaaccaacccgacctacgtacaaccctaactacgagaatcaaactacttatataatattcatcacgtattttataaaacacagttcagctatttaaacagtacatatataaagtcataattgttggtgattcgtaaggctgtcacatttggcccaaagctaaatgaaggttgggcgggttattgacccactcatttattgaactcagtctattttggtccaacccattaaaagttgaactgatatttagcacaaattgatccatgagtagctttgttaaaatatcttagaaatattttttttgtttgatatgttgtatatgactatacaaaagaaaacaaatcttatttagtaattatacaattcataagaaaacaaccttaattaaagcttggtaagaattgggtggtgggttaggctatgattcaaattttagctcattttttactcagcccatgtcagcccaagtaacttttcagctagtcaatgatccaccaatttatgacttaacctattttgactagcccaaaatcggcccaacccgtccattttacactcgtagtgatttgaaacaatcatggtcaaagaaaattctctttcaactgtcttaacagtaatagtctcacataaaatgaaaaatgaagtgtattgtgtatcaaatgcacgttattattcagaaaagatacgttgtagacgtaaatattaattggccattttgataaaatcttaacgtgcagattggacattagtgccattgattcagtaccggtcaatttgagaccctcttatcaagtcttagtagattttttcaatgaaataggacaagaactggcaaaagaaggtaaagcagatcgtgtctactatgcaaaatttgaggtaagcttgcttaataactcaacctcattaatctttgaaaataatttacaaggaataaaaaaaggttggtgaggaagaaatttttttggatgatcactcactttatttcaacgaggtcatcaaaagaagatatagtgtgctcattatctagttttacttttttcattattttttcttagatgaaaaagtggatcagagcctatttcaaggaagcccaatggttgaatgctggctatattccaaaatgtgatgagtatttggaaaacggaagtgtaagtgttggcattacgctgattgcagtaacttctttggtttgtttggaggaacttataaccaaagaaactttagaatgggtgataaatgatcctttgattcttcgaacttctggagtaataagcagattaaaggacgacattattggacacgttgtaagtactacaatttaatttacatttaggcctctcttttttctccttaaaaataagatgcgtatctgaatctgaatacatatctaaatggcggtgatacaaatacatagtggtggttgagagttgtcgtggtaggtggtgcatgttggttgacaataaaggtgcatggtggctaatggtggttgatgaagatgattgctagatagacaatagagggagtggtggtgatatttggcactggaggggattgatggtgttggttttgttgtgtggtggttagtggtatggcggcaagggcaaagccacatggtcataagggccgaaaagttacactgtgtatataggtaaaatattatgttttagaggcatattgaacattctttatcgaaaaaaaatttcacttagcttttttcaattgaatacccatggggaaattcctagcaacgccactgttggcggtgtttgttgtgggtggaggctggtgatggtgattgtgctatagtggtgggtagataaatagtggtaaaatatcaaattcgcatgagtataaatgaacaacatcttaataattcaaaggctttgtacaagatctgaatgaatcaaacctactcagtgttgtaattgtatagttgtacactgaacataatgaaaatgtatctattgggtgcagtttgagcaaaaaagaggacatgtagcttcattcattgaatgctacatgaaagaatatggagcttcaaagcaagaagcatatgctgcggctgaaaaggaaatggctaatgcatggaaagatataaacacggaattcctccgcccttctcaagtatcaatgtttggcctcgaacaaattataaatcctacgcgcctggtaattggtttccaggagaatgattttataaatactcaaggcgaatataaagacaaaatcacctcgttgcttgttgactccgtgaaaatatga

SEQ ID NO: 129 - DNA, 8671 bp, Nicotiana sp.
  modified_base (8341)..(8341): a, c, t, g, unknown or other
atgttgaattcgatggaggatggaaggttaaatgtcttagcctatgacacagcttgggtttcctttattccaaatactactaataatggaaatgatcaaagacctatgtttccatcttgtcttcaatggattatagacaatcaactttctgatggttcatggggagaggagattgtattctgcatatatgatcgactcttgaacacactagtatgtgttattgcattgacattatggaacacgtgccttcataagagaaacaaaggtgtggaatgtgttgctatatattactcagtatgaaacatgatttttatgttatatgtatacaatttatatgtatacaatttgtccaacatatttatacgatcagatcgcttaggtatctatacggaaattttcatgataaccattaatttgccggcaactttataaaaatggtaaatgattgaatatttaaaattatttcttaaatactattttgcactcgatatttacaccaaattaaattatttattctggtataaatgtctgagtacttacaaaactttactagtttcttaagcagggccggctctaacattatcacaagtaagacgtgtgccttatgcccccaaaatttgaggggtgggggaggcttttattttagaaataataggtttatagattttaaaaaaaaaatcatacttagtacttttagtacaaaactagagttgtcctataacaactgcaagaaagaataagaataagaagaattgcttaagtaaggtagtcgcttctttttttcggtatgccgctccgcgagcaaggagtgccacgcacgagcggagagttgaaccaagtaacattgtaaaggcataatgatagtagggtcgggatatccccgccctccgaaccggacgtgagggtctcccctcatccagaagttttattataattaattaataaaatcttgcctaatatcaataatgtctcaagaaagattaaacagaccgattatattattaattgagaatgaattattagaggaaatcgattataaataaaaaattattagccactttgtatctcaaaaaactagaaaagtagacttcatataaaagtatatcataattttcctttaaacattcaggcctcacgattaagcttgggttttaggccatatatgcttgagccaccgtgttcttaagctccttagcatttagtatctaatcctgttaatactttattcttgatccaatacttgcatgcttacaatggaccattcttgtttcctaggtgtgatgtttatcaaagaaaacttaagcaagctagagacaggggaagttgaaaacatgactagtggatttgaacttgtgtttcctactctccttgaaaaagctcaacaactagatattgacattccgtatgatgctccagtcttaaaggatatttatgcaaggagagaagtaaagttaacaaggtaaaatgactacacgtgatatgatcttgcacgaaattagatccaagatttaaatttaacggtccaatctatagtattttcagcatcaaaaccattgtactttttatgttatggattcggaatgtaatatttattgaacttagagtaatttatcacacatatatttatatttcatataaaaaatattatattcagttgtcaacggttctttcctcctgtgatttattaatatatttctattttgcagaattcctaaagatgttatccatacgattccgacaacagtattgttttcattagaaggattaagggacgacttagactggcaaagacttttaaagcttcaaatgcctgatggttcattcttaatatcccctgcttccactgcctttgcattcatggaaacaaatgatgaaaagtgtttggcatatcttcagaacgttgttgaaaagagtaatggaggaggtacctagaatcttcctttgtccataacatttaggtaaaggtgtgtcaaatagacgggttgggctggtcaaatgggctaagtcaataaatggacgtgttattcaaaagttactgagctgatcagatgagataagtcaaaatgggccagaatttgagtcatttatcaaactttaattaatatgtattgttttcttatgaatgatttaattttaaaatattttttttcttttgttatggtaatatataacatttcaaataaaaaaatttattttaaaagatattttaccaaagttaatcattgatcaattcaggctaaaatcaacccaattctagatggactgagacttactgtattaagatgtgttgagttcaataaattggtgggtcaaataggtttgggctcaaattgccacctctaatgacataccatggacaattccaaaatattgtacttcttccgtttcatttacacttaatgacaagttttgtagcaatataaatgttataacatgattaagatcacaagtttcaaatgatgagacatgcactaattacatgcaatatgtttagcgcgacaatacccgttcgacttggtaacacgactttgggcaattgatcgattacaacgccttggaatctcttattattttgcggaagagttcaaggaacttttgaatcatgtgttcaggtaaacaaggagcaatatatttgcgtcacacaattaagagcatgaaatcatcaattttgagcaatttatgtgacaagtctaatttattgttgaactacagatactgggacgaggagaatggaatttttagtggaaggaattcaaacgtttctgatgttgatgatacatgcatggctataaggttgctaaggttacatgggtatgatgttagtccaggcaagtcaatggaaaagttactcactgatttcgcaaaatttacttagtggacgtttagacatccgaaaaacgtttttcttaaaaaggaattctacgtagaaatggtatttgaaaattaaagttgtatttggatataaatacaatttgaagttatttttaaaattttatgagtaatttgaagtgaaaattttaaaaaataactttttagtaatttttaaatttccgaaatttaatttttcatgaattccgaaaaaaaaaaaaaaaaatttgaaaaaccaaatatgatttttttatggtcaaacgggccctaaagtatttattggtggcttaatccaattttttaattctgtcacagatgcgctaaacaatttcaaagatggtgatcaattcgtttgcttcagaggtgaagtggacgggtcaccaacacatatgtttaatctctatagatgttcccaagttttattcccaggagaaaagattcttgaagaggcaaagaattttacttataacttcttacagcaatgtcttgcaaacaaccgatgcttagacaaatgggtcatagctaaggacatccccggggaggtaaataatgaacaaagattttaatatttacatactgcagtgtaaaagaaattttataagttaaatacatgtaatcgtccatagaaaatgcaattagcaacttgaaaaatagggaaaaataattacatcttacattatcttaaaacacactaatagtaaaattctttacgcaatttatataagttaaattcacgagaaataaaccattctctccgttcacttttacttattcactatactaaaaatattttttttacttgtccactatattaaatctagagaaaaacaatcttcttttcatgttttactcttatcatactactcattctccgaatcattcccaagactttttaaaatactctcattattatgagtaaaattgtaaagagaatgcaaagtcaaaagtagacaactataaatgaactaggagagtactcatttttaaaaactatagatactgttggtgaaaacgataaataacaataacacaatagatctgtaacaacgaaaccaaatcttttaacggggtaaaatacaataccctcgagcagagcaatataataccactaaatattacaacttgatagtgtcaagatactactacaatttagaaaaaaataatactctttattttaaatacctcactacgatattactcgtactcataatttatctcataaactacaatccgtggaatactctctctgagtctatgttgcttatctcgattcggtgtatttgatccgaagagctgaagcctccttttatagcagcgaggaatcgttcctccaaccaatcaaaggattggacttacaaattgcattgcagatttccttaacttgttgcaccgtccaaaaccaatttgcaaattggttttgctatttgtttttcttttggtgttattgcaacttgttgtcacctttttttcttttttcttttatttagatgggttccatagctgcaacatgtaatactctttatcttttactatgcataatttgctaaatatgttgtaaaacatttatttatagataaggtatgcactagaatttccatggtatgccagcttacctcgggtggaagctaggtattatatagaacagtatggcggagcagatgatatttggattggcaagacgttatacaggtaactctttaagtatgttctgaaattttcttttctctggtgataataacatttttattctctagtcaataaacagttctatgttagttttcatttaggtttaccgtacataagtagttacacaaaagttaaaattaagagaggatttaacttggttaaactatagaattatagtctaaccaactcgtgtctcttggtacttcaaacaaataaatattatcataactgccttaggacggcttaaattggagtgtgattatctcatctaatattttagtttgctagagatcataattttatttacttaatttgccttaattcaatattcatgatcacctcactagcggacgtgcttttttttattttatggcgaagtacgtagaaagttttcttcaataacgggtgacgatgagattcaaatttaaaatctttacatgttatgatgctatgtttaattgtatgaccatctaaaacttcaagtgaacagacataacaaactcatatttatttaataatgcctttagtgcccatatatatttatgacgaagctctatggtaaatgaagatatttaagaataaatgaagattttctgtttttaaatataaagtgtttcattgaaattcttacagtacaatatgtattaatacactgtgtaaagagtccctccaagctcactcttaggcctattcaaaattgaaccgaaatcattaatcgaatcaaaccgatgacttattggcttattgatatcggattatcggggtaatagatggtaaacggattgagattatataattaacggcttaatggtttggggacagattacttaattttcttatcggttaaaccgttaacccgttaaagttttttatatttacacttttactcctaagtatataaacttgttactacattgttgcataagtagttgtacttagaatgatagaattgtctatagctaacggtagtcgtctctagcttctcatgaattatgagtggacatgaattgaattcctctctgggctattttacttatgcggggtttgtttcattacttcacttacaattagagtttgaagtttgtctataaatggggttttctaattattttgtggataacaatgctaatggtattgattgttcaaaaactaaccgagacagtttgaactatgcatttggccgtttggtaatttatttttatttgatttagccgataaatcgcccgataatcgttactctgtaccaatccgtctgttgactttttggatggctagcggattacaatatttataattcgataaccgataagccgaaccgttaagcgtaattatccgtccgataagcacccctgctcactcttggctatcttatctctatctcaaggtcattgtacatactgcaaatacaactcatgcagatgttatcacttagagaccatcttctatataactactacacacggcagtcacatatttacacgcaagcagagcattgaactaattttatatttaaaatttgaggatcatatttactatttatagcaattttagtagatttctacacaaaatttatatttgacatccaaagtgccgctagcatttaggggtgttaaatgagcgggttgggccaattttaggtgggtcaaaatgagctgagtcaatatatggacgggtcattgacccgcccaagagttaattgagctgagatgagttgggtcaagatgagctaaaatctgagtcatagtccaacttttaccaaactttaattaatatgtagtgttttcttatgaattgtataattactaaataagactttttttcttttgttatagtcatattataacatatcaaacaaaaaaaaattatttcaaagatactttggtaaagttactcatggatcaatttgaactaaaattcaacccatctttaaaatgggttgagatgagttgggtcaaaatggactaagttcaataaacggacaggtcaataatccgcctaaccttgggcgggttgagtgggtcatttaggctttggtcaaatttgacagccctagctagaatttaagtttttaggagcaattctaggttacacataattaagttcaaaaaacccaaagtatatggttgcctaattggaaatttgttaatcttttgcccatgcagaatgcccgatgtcaacaacaatgtttatttacaagctgcaaaattggattacaatagatgccaaagtcaacatcgctttgaatggctgattatgcaagagtatgtacttgatttttttaatgtttataaacaataaagcatcaagctttttatcgtctaaaatttgctccaactaatgattaggtggtttgagaagtgcaactttcaacaatttggaataagcaaaaagtacctcctagtttcttatttcctagctgctgcaagtatatttgaagtcgagaagtcaagagaacgccttgcatgggctaaatctcgtataatatgtaagatgattacatcttactacaatgatgaagccacaacttggacaactaggaattcattgctaatggaattcaaggtttctcatgatccgaccagaaaaaatgggtatttatctctctatctagtactttaaataattaatttatgtatgaaaatatccctatctcttacaacaattggttggaaacaaattcatcgcaagtgtcacacattctcagttttcacaactaacttttgaagtgggaatttggtttttatatctccagaagttatttttgcttttttgttttccttctttgttgcagtaatgaaacaaaagagatcttagttctcaaaaatcttcgtcagtttttgcgccaactatcagaagaaacttttgaagacctaggcaaagacatccatcaccaactacaaaatgctgtgagtatacaaggattccttttttatatatcttattctaactatacaagaaaatgtcacaaaaacatgataaatcacaaatagttcgtactttaccaattagttgtcaaccatatttgttttctcaagtttttgggtggtgaaagagacttggaggaagggaaagagaaaggaaaggtttggtcagaatcaaaccttacacctataaaataaaaggcaacaatattactagctagtgattatattcatcattcattttatccttatgtttttttatcaaaataatccaaacaaacaaaaatagatttaggatgtgttatatttattttcagcttgatatatatacacatacgaagaaaataaaaacatctgtataataagaccatacattcattttaaactcattgattctaaattttaaactcatctatgcaaaaagaactacaattaaccttaagactaatcaacgatgctactcttgaaattcatcatattatttttgcttgcatattttcttttcgagtgcagtgggaaacgtggttggtgttcttgagggaggaaaagaatgcatgtcaagaagaaacagagttgctggtgcgcacaattaatctctcgggcggctatatgacacatgatgagatattattcgatgcggactacgagaatctgtccaaccttaccaataaagtttgtggcaagcgtaatgagctccaaaatgacaaggttaggaaccataataatcatcttttaattttcttttggagtaattacacgaataataaattatttttaagtttattgtaccaaagtcatattttttttaattgaaatataaaccaattataggtgtgtttggtatggacatgtttggttgttcaaanaggatggagttatttctccatttaaaaaattaattctatgattttggcagaataaatctatgaaaacgaacaattctttttatttcagctttctaattcctctatttaaatctaaacaaatgttaggtgacgggcggctcaaagaacaccaatattgaactcgacatgcaagctctcgtaaagttagtgtttggtaacacctcaagcaacatcaaccaagacattaagcaaacattttttgcagttgtgaagactttctattacagtgcgcatgttagtgaggaaataatgaactttcacatatccaaagtgctttttcagcaagtctag

SEQ ID NO: 130 - DNA, 13994 bp, Nicotiana sp.
atgtcttctctctgttcaaactctgcaacttctcttagttgtaataactccttccaatccaaaaatcctcttcttcacaccatctttaacttctttccttcaatcaaaccacactcttgtttcccatatacagttatccggtgctcaattcaaaagcgacctgaatatataccgagtaaaatctccgaccacaaatacgtacgcattttcgacacgactctccgcgatggagagcaatccccgggcgctacgatgactacgaaagaaaaattagatgttgcccgtaaattagcgaaactcggagttgacataatcgaagctgggtttccagcttcatctgaagctgattttgaagctgtgagattaatagcagaggaaattggtaataatagcgacggtgattatgtgccggtgatttgtggattagcgaggtgcaataagagggatattgataaagcgtgggaagctgtgaagtgtgcgaagagacctagggttcatacgtttatagcgacgagtgagatacatatgaagtataagttgaagatgagtaaagaagaagtagtggagaaagcgcggagtatggttgcttatgcgaggagtttgggatgtgaggatgttgaatttagccctgaagatgctggaaggtttgcatttttactttcattgaccttattaaccttttttttttggatagctgtgtgggggccggttgctgtgcatttctttattctgtccaccacgaagacttatgcagatgaaagtaatgcacatttggtctatgattttcaatctagtgtgtatttggtaggaaggaaaatattttaagaaaataacatagtttctgttaaccaattcccaaaactattttcctgttattaaaagggaaaaaaagatattctttgcttgtgtttttctttatagtccatttgaaataatttctaaattataaaaagagtgttggatagtgagacaaagtttctactggaaaaatattttcccttgtaccaaatgcacccctgttttctgaaccattaataagtcactgcttttgaattttcacttcatattgctgatcccactgccccagggcatgattattgcatttggatatttttgttttatgatatgatgtaaatgtctattatgtggtgtttgtttcaaaaattttaaagaataatttttccattttcttttcttctttttgcaactaaacttttattagtggtgtttggttgaaaaactaaattttttttttctaaatttgggcaaaaaaggttttgcaattttcatgaatcaaagtttctgattcaatttagtattaactgaaacactccacctaagtataggctatggacagagtttgtgaatttggaaatgtggagtgagtggaacgtattgttttggttgtttcattgtattcagcttactatccacgaagttcagggttattcttcttttgagtaattagttaattgcttggtggactgtcctggatgagtttagatatttatttaaatggtgagaatatagttggtatatggcccttaaaacattgaaaaggcaatattctctagtctctttaaattgaaaagtgcatttaattatttttgctatatagtaatgctttctagtctcgtggaaaaactttataataattactacttgtcaatgttaatgtgcctttttgtaccaatgagtggtgtggactttgaagattctttctgatctcaaagaaaagttttgagctttaccttgtctatattagtgggagacaacaagtattgaaatgatcgagctttgctcaaattgactcagataccaccaattataattttttttaaaacttttaaaaaccgaatttgctattgctttcacttctaaaagcttgaagactactttactaatgggtcgtttgattcatgagataagagatactaatcgcgggataaagtgtgagattatttaatctcgtgtttagttggatttttattttcggtataagcaatcttgcagtaagttatgccacaactttggtattatttagagaccacattcaatatgggataacaatctaatcccgcgacaaaacaaccaaataacagatgtccctctctctctcttccaaatttgaaattcctttaagaagaccaaggttaaaattgaaaataaaaatttatgcaagtttatctattataaaaccaaacacatggttataatccaatgaaccaaacatctacccaaaaagatatttttccattaaataatttgattctgccctccatctcaaaatgaattatacatttcagatttcaagagtcaaacgagttgttttttgaccgtgactctttcatatgccttttaaatattttaaattagtaattatcgtgacttataatactttttatgtagtttccaaatacgtaaattttatttcaaaaagcttaaagattctatgtccgaattctcagtcaaaataaagaaatttaaccgaaatgtatcaatctttttgggacggagagggtactctttaatctcagtattataacccacattcgtaattccagtataacttgtttgcaaaccacacaacccctaatagtattgaaattgcggaaagtgaaacactttcttgatccttcttgcttggatatattgaccaactttctcttctagaccgagtctatgtttcctgtttataggtctgagcgtgagttcctttaccatatccttggagaagttatcaaagctggtgcaacaacccttaacatacctgatactgttggatacactgtgcccactgaatttggacaattaattgctgacataaaagccaataccccaggaattgaaaatgtgatcatttctacacactgccagaatgatcttggactttctactgccaacactttagctgtacgtgctcaattctcctgtgccaaatggttatatgctagcttaagttgtatgaaaattgaagcatgttcaatttcagggagcttgtgcaggggcaagacaagtagaagtgaccatcaatggcattggtgaaagagctggaaatgcttctctggaggaggtgggtgagggtcttgtataatgaaacttcagggtcttacttgcatgatttgaggcccacaaactgaagggggtcaggagtgggtggtaagaaaaggaattaatgagattatacagcatatgctgtgaatttccattgatgcatttctgcaataccaaaaatgagtccccaaaatgttttatctatggtatcacgagtcttcccagtcttttccaaattaaatggatgtcttagtctagtccttcacactcaataacaaaggagtagaaatagtgtaactgataacagaagccaacaactttaaccaaaaggaaatgtaggatctttgcaagtgataaatgaactaatgacgatactcagagacttcagaaaagcatgggatggattgttactaggtttaatgcttatttatggaagttattattattttctttgttagaattgtatgacaaaaaaagttggatgaagaagagtaaaaacaagtacatacgtctaacttttttgccatataattggttttataacgttcctatattaactaaaaacgaaagaaagatggatacttttctttttgatgaggaaaagaaaagggggtcgatacttaatttgaggcaagggagtttttttcccctttttatacctgttcaacaaacatctgtagttttgtaagaaataaaggctctattccctgtactattaattataactttctcggtttcatgggtctaaaaaggtgatatacaatcaccttgatagtagtaattgttcgaattaaattagctgtatattcaaatttggtccctctttcctttataaacataaactcttgctttagaatatatttccagtcaaatcaggacatttgatatggtgtcaaaggagtatgtgtttgtctacttacaaagatgagcatgctcataaaattatgaaatatctagaaagggtgcctgttttcatttatatgttttcatgtttctgcatcaaagctccagaaaatatggaggatcatgtttcctttagtacatttttcgctgttgttgagattgctaaaaccgtttagttgtatgttttcccttccctctgcaaatttgatgaggcatggatgtgcagcagccaaaggataaaaagaaagaaaacattggataaatgaaaatgataaaatgcttatctaatatcctcttcttgaagttggtactccctatgctccaaattgaaatgtttggctttcctttttggagtatctcctagctacgaataatattatgtcactttctatgtttttcagctctaaatttttcctttctgaactcttggaaaaaaggattaatgaagctttagtactctgtgatctgccatctaatgtcaagtaattcacataaatattccaaaaaggacaagcaatgtcaaaatagaacatgtaagtagtgacaagggttcacacagtaaaatctaagccctgatcaacttgtgtctgtttgttgcccaactcttcccgtcctggtaaatgcttgttcatcttccaactggtttcatactgaatttggtgtaatatttgcttatgtatatgactgactagctacaacaactatgcttcaatcccaaacaagttgtagtcggctatatgaatcctcattccttcatttaagctcaactcatgtcatcatcatacaaaataaaataaaataaaagtgaaaaatcatattagaagttctctaacaagtttaaaacctattcccagctagtagatatcacctatatagatcatcttcttctattgtgtcctatttttagccaagtcttcattaattccaaggattcgtaggtctttcgtgacatatgacggaccagctacttttctttatttgttttactgaagacaaatcatatgacttgaatagtgcaaacttgcaaccaatactggaatattttatgtgacagttgaaaattgacaaacaactgacttgtataggaattcttttatctctttggtacatttttctgtttggtcatattcttgtgtttttttttttttttttttttttgggaaaatctgcagccgccataatctctgcctttcgggtgagcactttgtgtgtactgggtaaacctcccctgtgtaatagcctgcaaaccacacaggggatgtaaaccgcactaggcaagccctgtgcgacaggctcaacccagaaggcattgaggggggattcgatcccaggccatccatatggatgaccactctccaaaccaactgggcaaccccgaagggttttcttgtgctttccttatttcgttttaactttttacctttttcctgtaatgaaataggttgtaatggccttaaaatgtcgcggagagcaagtattaggtggcctctacacggggattaatagtcaacacattgtcccgacgagcaaaatggtatcatacccctagtttcatcctaatcctctagagacctttacccgttaaaccgtgttttctgtgtgttttattgctgacatctagctatgcaggtagaggagtacactgggcttcaagtgcagccacataaggccattgttggagctaatgcatttgctcatgaaagtggcatccatcaggtttgtgttattttctctaattatagcatggatgcacctagacttaattttgtaatatttccttcatattgctaaggttgaacataacattcagctatttaagttgatagatccattcgttagtctactagtttattgtgttttactgcctccttttgagacagtggacacttgattcaatgttccttgaaacttaaatacgtttatatattttatgtaagtttgatgaaataaaattatctatagaaaaagaaaacaaaatggattgtatactatcaattaaactgtatcaccagcatgataggttccagaagtggtttggtttagggtgctagctcaaaataatgatgtatggggctgttttaagagtaattcaggttgtctatgtatctaacattaagttgatgcctagaagttaaaaggttcagaagagaagaaaagaagggaaagagatcactagttttttttgggaattcatcaacaaccaaaacttgctgaaaagcttgacgaaactgtgagaaattagagaaaaggaggagatatgttggaaacttgatcattttatgaaatacaagacatactgatttactatatttgttcaatatgggaaatgttaaatttaagaacttatctcttcttatatttcgaaatttaacattctaacattatttaacattcaagtcccctcaaattcaagctagataaaccaacttgagttttctttaaaaaaaaatagtaaataatcgctagaaagacttgccgaaaaccattgaagaattattgaatctcgcatgggaaaggcgttggtccccagaatatcatcggaaattgtttccagaaaattggctagaaagaggcatgtgtggtagagtgatgagaacttaaatggctaacaggcttcggcaggtcgaggtgaaggactgacgggtttctaggatggcaagcttacgaataagggttgcatgtgatgccttaggcaaattctatatcgaaaagggagggaaaagtgaagtactatattagagagagtagaagttcacatggtacgtgcgtcacgaaagtggcgtagccctaaggacaaatttgtgagttctgttgggtcaaagcaaacaatacatgccatgagcttatgctatgatttacctgtgttggtgggagatgacagatgaccgagagaataatcgaggtgcgcgcaagctggctgtgcaccaaatttatctaaagagaagaagagagggaggcatgtgtgccctgaatctcacgggaaagttaattctggaacaatggtcaaacagaggaaggtgccaccaaaatggtcatcggaaaggctctgttgcaggaacaactgcaggaaaataggcaaagaggcacaacggtaggaaaagaggcacaacaatgaaaagaggcaggtgttggcaaaacagtaaaagagacatggtgcttgttggaattgaaataatctagtatcactgggaagctaacaaagtaagcctcgaacgacaataaatcagatgacaaaaagaataatttaacgtggtttgatcaattgacctacatatgagcaattcactaatataaaagaaaatacaaaaaatatcgagagaatacttcttccctaaacaagattctcttatgactatattgtgaatgtcgttaaaatgagaaggaaggattttcagcttatagagatccaaaaccttttctccaagaaaatgattagccaaatacagaagatttatattttcctttgaataaagtaaaaccaattatggtaaatgctttgtcctttcttcaagagaaagtaaaattcaaatatggtaaaaaacaacaacaacaaacaacaaacaaatccagtggaatcccacaagtggagtctgttagatagttatgtaaataatatgaattagtcctagtctcacatagaataggagtatgatatatattgtataaatagggctcattgtattataattaaaagaatatcaatgatagatttttctctcgtgcattctcacatggtatcaaagcatcggtgagaaaagatcgttgtgcgtcattccagcgacatccgggaagaaagaactcagtcattaagttactgtttgcgtcaaagtcactaattatcattgttgtgcgaaatccaacaccgccacaaggttcccaagagagaggcgaccaaacccaaaaaagattctcctgaaaaaacccactcacgcggccccacgcgcctgtcgaagatctgcctccgacggcacatttgtcccacgcgccggcgcgcgaggtctattccggccagaatttgaaaaaccttctgttggacagtatgatcgccttgcaattccgagcctattcatccaatttaaaccaaattccgaccacttttatatttttctggcgtgaacagtgatttccaaaaattcttattttttctggtgtgaatagtaatttcaaaagggtttctgatttttccggcgtgaaaatgataatgtcattcgtatcagaagcctttgactcacaatccgttggatgtaatgcattgaatccaatccagatggtttctttatcagattatattgagttccttcaatacaaagcatgtaaacagacatcttcagagataacttccgttgttcaaataggtagtagcgtgacttgtgtctcccaatcttcaacctccgggtcttgggtcattgattcaggtgcatctgatcacatttttggtaataaatctcttttcactactatttcatgttctcagtctcttccaacagtcatgatggccaacgggtctcaaaccgtggcaactggaataggtcaagcaagtccacttccttcattacctttagattcagttctttatgttcctagtattccttttaatctcatagccattagtcgcttagccaaatcacttaactgctctgttttatttcttgatgaccttgtttttatacaggaacgtagtacgtggcggatcattggtaccggacgtgaattagatatactttattaccttatccttgcaaaatcacatggactcacatcttatcttcctttaacaacttgtcctgttactgattaaccaggtttattacataaacggttgggacatcctagtttgtcaaaacttcagaaaatggtacctggtttatctcacttatacccaccatattcaacctctcacacctcctcacttgggcgtcaatgcatctcctcatcacatgcccgaaccatctcagcctcacttctcgtatcttatcctccacgagggccaccccatatcttttcccgaatatcttcgtttctgaccctatcttccaagcccacacatccacctcagcatcctcatttccgttactttcattttctggacatgagagttcttaattggccaacactccaccccatataacataattggtctaaccactactctgtagaacttacctttaattatagatggcacattcttatcatacaagacaccagaaacaagcctccatttgatccatcctgcttcaatacggtgtgtaatatcctcgtcaatctagcctataccgcttcttctccccacttttggccccaagttcttcatataatcatctgaatgccatcgtcttcaccgccgtaaccaccagcttcgcctccttattggtcgtctcataccactttttatttgttctcttctcctgctcgtctttgcttgccaccaacttcaaatatgccgccttcttggtttccactttcccttggacctctctattccaccaccagtcccctcttgtccattagagtagctcttcaaaactcctaacacctctctaggaagcagtttgttgtccttgtccatatactactcgcaatcccactactcgtctaggctcccgtagccctcatcttctctcccaactcttgagatctatccttagtcaaggttccccacttgatcttaggtttacaatacacaaccctcttcttcctatctctcttaatcatcaagtccatcaccaagagcctatgttgggtcatgagattctcattcgggataattttacaatccgtgtataaatttctgtcacccttcctgagaagaaggtaatcaatctgggtcttggccattatactctggaaggtgaccaagtgctcctccttttctggataactcgaattagctataaccaaatcaaaagttttagcgaaatccaatagcaaggtccatcctttgtttctatctccaaaatcgaagccgccatgtacatcgtcatatcccctagaggtcatccctatgtgtccattaaaatctcctccgaagagtagcttttcggagtgcggaatagctcgaactacctcgtccaaatctttccagaagtgcctcttgacctcctcgtccaagcccactccacttgaggtgcgtattcactaataacgttgaaggtaaccccatgaacaactagcttagtagccctcaagtcgttcacactgctaatctctaccacttactccttgagatccctatcaaccaaatacctatcccattcttgcccctcaagcctcttgagtaccacagttttaacccgtctacatcccgtgccttagttcccacccatctagtctcctggatacaagctatgttgatcttcctcttttggagaatcttcactagctctatagattttcccgtcaaagtacctatgttccaggccccaatcctcatagtagatgctcctttgcccccgttacctcccttaccctccgccccccgccccacccgaggacaagcccttactttaccatctgtcactaaagtcgctatactcaagggttaactatgcaatcactaaagggtaaactatcgctaacggataaacaaaagtagcactataatcaagcaatgagcctaaaataattgaataaatacaaacttaaaggcactaatagtacagagaagcaagcaggtattgtgctaagactatggcaatgaaattaacaaggaatgaaggtagaaagcgataggtgaacaggaggtaccaactctcgagagctagaacctggattagagtcgtggatgacgaggcgtagctgctgctgtacggcagaatcaaagggcttaagatatcttttagctctcaacacaaagtgcttaacttaaagagatccaaccactctttcatctctgagattttccatttagtttttggccttttcacttaaaggtgcacatttgctgttattttctctcttaatctatcaatgtatattcaacatgtccgttatagctcaatccaatgatattttcgattgactgtttcagattcatcttggacttaaattatttctgttattattctttgattattggtagtaagttagccatcggtccctcagtctttttccttgtctgatgattagtttttctaactttcgataatcgtacagttctcaactaaaagaagcgataataatctaagtctcttttgtcttttcacttctctttttatatgctataggatggaatgttaaaacacaaagatacctatgagattatatctcctgaagatattgggcttaatcgtgctaatgaagccggtattgtccttgggaaactcaggtatgctcttgttttccagccaataattatttttgtactgtcatagagatcattcaatttctttgctttcgtctatatttattatatatgctctttactttgcttttacatttcacatttccttttagtcggtaatatggaaaaatattttagtactggaatctagctccatgaactccatgctgttagactttgcttttacatttactatttttgtctagtcgctatcacgcaaatatttcttttagtactgaaatagtgctccatgaactccataacgttactatttttgacagtaaatcgtcctccattgttataaagtagtatttcagtatttagtatctctcttttatgttgagctaaaatcttgttgagattttcttgctagaatttcatgtttgtcactatcgttacaaaatctttataatctttaccattctccatcatgccctcgtaatttctcatttactacattcacattgaactacatccttccttttaggaaattgataacattttgaaaactttttgcagtggacgccatgcattgaaatccaaaatgcttgaggtaagtgacatgccctatgaattgcatattccgtatattttaaaaatagggatcaatcgttttaatcctactccagcttggatatgacattgagggaaaagaactggaggacatcttctggcgatttaagtcggtggctgagaagaaaaaggtaactgaatggttcatattctcattacccggcgctagaatttgtgttgtccatagtttcttcagttcattcatgaatgttatctgggctgaaagcaatatacaagctgaagcagaggaaatgtttgtctatttgttgatcttccctactactgctctttcagaaaattacagatgatgacataatagcactgatgtcagatgaaattttccagcctcaagttgtttggcaacttgcagatgtacaggtacatgaaatttttcctctgtttttgctggtcttttttgatttcttagttctggattaaaaagaatagttcagctgattccaatgattcaccgctcaatgtacagattacctgtggaagtcttggcctctctacagcaactgttaagcttattgacagtgatggtcaagatcatgttgcttgttctgttggaaccggaccagttgatgcagcttataaggcagttgacctcattgtaaaggtttaaaatggaactgaaactctcataatagtgtagcttgtcaccctagtaggacagagaatttattgctagcagctttataggaatattatccaattttgcagttgctttgtttggtaaaagcctccgtaaggccgagtcatattcaaagaccacaccgataataattgcatggcctccctggcttgttaatgcgtcaggtttgagtttttgttggacaagcatttgaagtaggattgttcttgttgatagacatattagctgagctctgtttcattttcattacaagcatcctggtcggtggattaattattagacttgtttttcatggaaagggtaattcgtcttcgtagaagcctaaaagttgtcatagttagtggaaaagaaaactatgttagacatgcatttcaagccagaatcctgcaattcggtacttatgtgaaaaaaaatgcacttttagttgtgaaactttgccttttatgctgtactttataatgttcgccaactgcatcaatatgctgttcctcatcatgcaggtacctataacactcctcgagtattccatgaatgcagtcacagaaggtatagatgccatagcctcaaccagagtgttaatccgcggggaggatgaccatgctataaccaatggttcaattggaccgactcttcaccgtacatttaggtgtgaaatttacttgaaatattgtttgcctttatccctttcagttctttcatgtagaataggggaacatggacatgacagcgagtcagagataagtgttttaatggaacattttccaaagtatgacacagtttggaagtgaaatgtagccaatgctataaatctagggccaacataagaatagaaaattatatacaaaatctgaaaggtaacaaaattcggtatctgtcagacatttatataatataaatatatctcaggttatgaatctcagtagctaaatgtcaaacaatataaactaatataatttatactttaagcagaatccgaaattgacatcacattttttttttatgctactgcaaccctcattcatgtacaactgcattagggacctttcgaacactgcttgcgtccaactgtcaacctgagtgttctttctactcctcttttgtcggttgactgactctaagaaactctagtcccggtgtgtccaacaaacaggagagtcaaatgctcaacaaagtaattacatgcttgaccgtatatcaattcatgtcctacctatgcatgtgtccagcatgtatgttgatacatgaatatcatctttctaggcgacttgcgcgcttaccggaataaattcatcagtttttctttttgacgtggaatgttcttgtcttctcacttctgccagtggaactggagctgatatggacgttgttatctctagtgtccgagcttatattggtgcattgaacaaaatgttgagtttcgggaagctggtttccagatacaagaagcctgaaggtagtgtggtagtataa

SEQ ID NO: 131 - DNA, 2662 bp, Nicotiana sp.
  modified_base (2206)..(2206): a, c, t, g, unknown or other
atggacatggcaatatgtaccaacgtatggatgctacacatggccacctccaaaagacctccgtcatctacttttttaattttctcttttagccgagtaaagccaaaaaccagttgtctctctaccgcagctgcaggcggcatgataactgaaccatcaactaatcagtactctgctatttcatcttcagatcaaaatcccactagacgttcagggaattaccaacctactatgtgggattttgaatatattcagtccatacgcaataattatgcggtaaaataatttttttagcacatattcatgttattcaataatctgcataattaattcattgtaatatcattcaaaagattacgtacgttagctgatcatcaattgtaaatgtattgcgtagggagagaagtatatgaagcgttttaacaaactgaaggaggaaatgaagaagttgataatggctgagggatcacaagagttagagaagttggagctgattgataatttacaaaagcttggaattagttaccacttcaagcatgaaatcatgcaaattttgaggaccataaacctaaatgcagctacaggagattcattatatgccacagctctgaaatttaaactcttgagagaacatggttttcatatctctcaagacatattcaacgacttcaaggacgaaaatgacaatctcaaggaaaatatttgtaaggacacaataggtttgttacaattatatgaagcttcgtttctcgctacagaaactgaaaccactttgaaatatgcaacaagattcacagcggcacatctgaagaattatctaggcaatcattgtgatcataaagacaatcgaatggtcgcattagcgcaacatgccttggaactgcctaggcattggatgatgccaagattagagacacagtggtatataagcatttacgagattatgtcaaatgctaatcctctgttgctcgagcttgctaagttggacttcaacattgttcaagcagtacaccaacaagatttgagaattctatcaaggtgagatatattttaattaagtggattaaagttaaataagatgatttggttttatcctataatttttcttcatgtaaaggtggtggaagagcacatgtcttgcagaaaagttgtcattttcaagggatagactggtggagaatttattttgggcagtggggatagaatttgagcctcaacacagctacttccgaagaatgttgacaaaagtcattgcttttgttggaataatagatgatatttatgatgtttatggcactcttgatgagttggaagttttcactgatgctattgaaaggttagttacttttgggaaaggcagctatatatatctctagttaatcacctttctcttctgtttgtcacgtaaaattaatttgatatatgataatataaattcagatgggagataaaagcgatagagcaacttccacactatatgaaagtatgttaccttgcactcttcaatattaccaatgaaatggcatacgagattctcaaagagcaagggatcgacgtcctaccctaccttacaaaatctgtatgattcattttacttaagatttttccttcttttagtacgtacccttaatttcatctagctattgttctctcttcccaaaccgcctctaattctctcctgaggcgtttccaatatttaaatttgatgtgtttaacttttaagcttttcatcataaaaatcaattgtatttttgaaattacgggttcaaaatttaatatacattgaaaatttaccgaaatttcacatatatagctatgctctaacctattaaacccatgcgatatctgtctcagcctttgcaatatccccaccccacccccaaaacaacaacaaaaaaagaaatactacaaatttaaaaaacaatcaatttatttgcactactaattatttgagacatgttattagtgggtagatttgtgcaaatctttcatacgagaagcaagatggtattacagtggatatgtgccaactctggaagaatacatggacaacgcatggatctcaattgcagttcccatggtattagttcatgcatttttcctcgtcacaaatccagttcccaaagaggcattggaatcattaagcaaatatcctgacttaattcgctgctctgctacaatttttcgtcttgccgatgatttagcncaatttttcgtcttgctgatgatttagcgacatcatcggtatgctttttaacctttattctctcatataaaattaatttatacgactcttgatttataattataaacaatatctgtgtctcatttatttatttatttattcttataattaattcaggatgaattgaagaggggtgatgttcctaagtcaattcagtgttacatgaacgaaaagggtacttccgaagaagaggcgagagaacacatacgtttctgtattaaggagacatgggaacggatgaacacaactcaaagggaaaactcgttattttctgatacattcgtcgaaattacaaagaatatcgcaagaacagcacattgcatgtatttgcatggagatgggcatggaattcaaaatggcgaagttaaaaatagtatctccaaaatactttttgagcctatcactccattatattaa

SEQ ID NO: 132 - DNA, 1664 bp, Nicotiana sp.
atggagacacaacacttccctttcattttcatttcactcttgatattcctttctttcatctttcgatttgttctgatacggaagaattcaagaatcgttaccaaaagattgcctccagggccatggagtctacctttaatcgggaacttgcaccaattaatgaatggtcgccttccaatacatcatactctcagaagtctatcgcaaagatatggaccgatctttcacttatgtcttggcgaaatatcgattattgttgtatcttcacctgagatggcaaaagaaattatgaaaactcaagaccttcgctttgctactaggcctgaatttatgtctggagatattattttctacaattatacagacattggaacttgtccatatggtgaatactggagaaatatgcgcaaagtgtgtgtcctggaacttcttagtgcaaagatggtcaagtcatttaattcaattcgacaagaagagatgtcaagtctcatttcatcgattaattcaactcctgatgactcattgatcaacttatcagacaaaatgttttggtttacaagttctgtaacttgtagatcagctttcgggaaagtgattcatgatcaagataagttgataatgttggtgaaagacgtaacattattagctggtggatttgacttggctgatttgttcccttcccgaaaatggcttcacgagatcagtggattgaagtccaaaatgttgaaagttcacacaaaaatagatgtaattttggagaatatcattaatgagcatcggaataatcgaaaaattggtaagaagggcaatggtgagtctggaggtgaagatttgatagatgttctactacgagtcatggagagtggcgaattgggaactccaatcacaaataagaatatcaaaggtgttattttcgtaagtctaatgccatatgagatatttcattttattatttatagtatttaaacattgaagttaatatttatgctagagtacagtattgaaacgttagaaattgtatatatcttaataattttctttacatgcaggacatgttcttagcaggagcagaaacctcatctacaacaattatttgggcattggctgaaatgataagaaatccaaatgttatggctaaagcacaacttgaagttagagaagtcctaaaaggaaagagaacatttgaggattctgatatagaagagttgaagtatctaaaattagtgattaaagaaacattaaggttgcaccctcctattcctctattactcccaagagaatgcagagaagaaacaaaaattgaacaatacacaatacctatcaaaactagagtcctagtgaatgcttgggccattggaagagatactagatattggcatgattcagaaagttttatacctgagagatttgagaataattctattgatttcaaaggaaatcactttgaatttattccgtttggtgcaggacgaagaatgtgtccaggtttattattcggtttagttaatgtaggacatcctttagctcaattgctttatcacttcgattggaagactcttcctgggataagttcagatagtttcgacatgactgaaacagatggagtaactgccggaagaaaggatgatctttgtttaattgctactccttttggtctcaattaa

SEQ ID NO: 133 - DNA, 13689 bp, Nicotiana sp.
  modified_base (3528)..(3528): a, c, t, g, unknown or other
atgatacttggctacagaagcaatatcatactaccattttctcatcatagtttggaaaatggcaaattaggttcatcgaccagtaagacatataattttgatcgctgcaataatatattttataattcaattcttttgtaaccatgtcctaatttctgtgcgtgtgtttttttccttgttcgaaggaaatacaatttcccagagaccatgtagaggagtaagatgcagctacagtattgcttcatcactggtaatatgagtcccttttctgttccttttttgtttgctggggggcgtcgatatgtggggtgatcgaaccgactcatctacaattatctttaaaaataagacacggggaaggggaattcaaaggaaattatatatatgtatatatatataatgaatttgaattttgctcacaaatggattctgtttgattgtattcgcccaacagaatctataaataggatttgaaagtaccaactagttatgaaatcagattgatagccttcacccctgttctagctcgtcggaaagctagatttgcctcaatttttgcctccttcttcagcctttcacacacacacactaattgaaaggaactaaactcttgcacaaaatgggtgtttggtcatgactttacttgcaaatatgcaagaatgttcaatctgaaagaatggtgaaatgttataaaagaaaattagtttggcgaatatttcacattaataattgctttcacttacaaatctttctcttttttcgaagtgaaattcatgtccaaaaaacaaattcaatttttttttttaattttttgacttcatctagatattgtccaaaatcccacttatatattcttttatgttccttaattcttctttcttattagagatctttacacaaataaccggtcaattcatagcttagttagtatacatagattttatgaatgagaattttggcgtaactggtaaagttgttgccatgtgatcatgagatcacggatttgaaccattgaaacagcctcttacaaaaatgcagggtaagattgcgtacaatatgcctttatagtctggtcctttcccggaccccgcgcttagtgcatcgagctgtctgctactgattatacacatttatacatctattacatatttgctgactattcttaagttaaagcagttgggtcagcggcttggttaatttttcttcttcttcttcttattattattaaaaactagttcatctctggtttgtaggatggtttcgaagaggcaaaggagagaataaagaaaacatttcagaaagtagagttatctccttcttcttatgatacagcatgggtagctatgataccttcaagaaattctgtaaaccagccatgttttcctcagtgtttggattggattcttgaaaatcaaagagaagatggatcttggggattaagtcctagccattcattgcttgtcaaggactcactttcttctactttagcatgtttgcttgcccttagcaaatggggagttggagataaccaagtccaacgaggtaacattcttcaattaattttttttgtgagaaagtaatgctgaaaaagaaaagaagtttgagttctatatgtggacgttttaaaaatatttatataaacaggtaggggtgtacaaaggaaatcgataaaccgcaccaaaccaataattcaagtcaaaccggaaaaaaaaaatccgactataatttggtgatttggtttggtattagaaaaaaatctgaccataattggtttggtttggttttaactgaaaaaagtcaaatcgaaaccaaaccaacccgacattacatgtatacaagttttaaaaatattttatacataaaatcataaactatttactagttctctcctttaatgtatacattacatattttaaaaattattttaaaataattattgtaatgtaatttataaatataatttaaactctttactagttctctcttttaatgtattcaagcttggacttagaactttgaatggtcaaatatgttttatagctcataaaagttagtaactcaaataaagcccaaagcaaaatcaaattaatactaatgctaacaaaaaaaattcaattcaatactataaatgacaatagtattggatttgttttttttttagttttgcattgattttgatagtgaaaatgcataactcaaaattaatattatttagtcatgtaattaatacttagtacttattagtcgtatttattttaacatgacttagtacttttagattatatttatttttattatagcgtattaattaaattatttattttatgcgatttgttgagtattttagtataatcatgactcatcttatattattttgtattattttattgggtaacatcttatatagttttatcctactaggacataagaaatattagagcataaattataaatttatactatgaagattttgtcagaaaaacccgagaaaaccgaaaaacacaagaaaaatcgtgattgaaaacctcgacttttattggtttggtttggtttataaatttaaaaatctgagacaattggtttggtttggtaattgaaaaatccgaaccaacccggcttatgtgcacccctataaccaggtcatttaattagacaatcatatttagatgagaaattcaaaaatagtcagatttacaagtggtcattcaaaaatagttatagttttaaaagtaatctaaatttagtcactttttatgtaaagataaatctgaatgaaaacactgttcaaaatccgaaaaaatattcatgtatattatactggagttatatactggaactccagtataatatactggaactttccgtgtgttggagttccagcataatatattggaagttcatacacaggttcaccgatctccagtatattatgctggaacttttcgtgttgcagcaaaatagtggctatttttcaatgactttgtaaatgctggctatttttaaatgatcagtctgaaaactggctagcccatgttattttaatttcttggtaagggctgtatgttgggctaaaacaacccaaaaatactcttaacatccgcacccacatgattcaagtatttgtgttgtgtatgcaccatctccatactcgtttcgccaaaccattagctctgataccagttgttaggcttaaacggtccgaagatactcttaacatagtttgatatagttcgctttgggccaagcccgcacgatttttcccaaaaggtctcaaatcattaagagtattcaactccttataagtagaatttttttcctttctacttttcatgtggaactttattcacatacaccaacaggcaacccggtgcactaagctcccattatacgcagagttcgagaaaaggccggaccacaagggtttattgtatgcacccttagcttagcctgcatttctgtaagaggttgtttctatatttcttaataaatgttaattaggtttatccgataaagctggtaattgacttnatatatatatatagacacgattagaaatatagaacgtgtggaggagtttgcatcttgcaatatttgtaattacttgtggagttgcttcattttcttttcaggccttatctttattgaaaagcatggttgggcagttgataacaaggatcagatttcacctgttggatttaggattttatttcccagtatgatcaaatatgcagaaaaaatgaacttaaatctgcctttgggtcctgacattgtaaatctagcgattagcaaccgagatttagcaattgaaaggtatgcttcttaatttattaaattatcaattattctacaaagaaaattatatttggatgctagatatatttttgaattctcccctaacgaatattgtctaaaccaaatatgagttatctcattactaaactaagaatcagattttattaattatttggctagtgcaagaaaacaactactcgaagcaattaggaaggtttttttttacattaagacaaagcaagagcaaatgctaaatgcatgaagtgcaaaactctacttaaggatggtctttttacattaagacaaagcaagagcaaatggtaaatacatgaaatgcaaaactttacttacagtgacatacgtatgatttttcataagcggtacaatactttaaaagtatagtactaacaacatcgtacaaaaaaaaattacaatttgaataatattaataaaacacaaactaactcatatattactacaactcttttggatcatgagtttcgtgatttgagaactatttaaaaataacctcattagaaataatattaagtattatttttctgacaaatcattcttaatcaattttattggcaaaaaaaagaaaacggaagtaaaaagaaaaagaatagaacaacaacttatcatggaagcagcagacatacaacaacaacaaaaaaactctgtatatttttacaagttgggtctggggagagtaatgtgtacgcggactttactcctacctttaaaaagacagagatgttgtttctagtagactctcggctcaggaaagataaagagaagaggcaatgacaatggcaagcaaaccaatcagaaaaccaagcgaaaatacaaaactaacaccaggatgtagtgcaattagaaaaccgaaacgaaggcaacaacaagtaataacaaaagtttagaaatataaaaatacacgaaaggcactaagtgacgtactaaagctaccgtaagaaacaatgacaaagctcggctacctaactctctatcttaattttcaacatataccccttcctatcaacggtcatgtccttagtaagttggagcaacgctatatcatacctaatgatcacctctccctaatacttcttcggcctgcctttacctcttcgttggctctccaatgctagcctctcacacctcctcactggtgcttatgtgcctttcctcttcacatacccgaaccatcttagtctcgactcccgtatcttgcaattactaagaaaatctggttttagcgttgaattttgcgacagatggtgttagcgacagcgaataacgacaaaatttagcaattagcgacgaaaaacctatttagagacgaaattatttagtttagtgacaaaatcgttccatagttaattcaagtttttttgtagtgattaattgtcctccacagaggtcacgtgcatcgtgtcatggataacttcatttctgattatgtctaacctagtatccccgcacatctatctcaatatgctcatttcagttaccttcattttttgtatatgggagttattgactggccaatactctgccacaaacaacatagtcggtctgaccactctatagaacttctacttaagtcttggtagcacattattatcacacaagataccggatgcgaacctccatttcatccttcccacctcaatacgatgtataacatactcgtcgatctccctattcacttgaataactgactcaagatactttgaaactctttctcctaaggatgacttatgaatcaaaccccacgtcatcgtccgctacttgagtcgcaccactgaacttgtactccaagtattctgttttagtcctgctcaatttgaaacctttaaactccagagtctgcctccaaatctctaacctctcgttaataccaccgtgcgtctcgtcaatcagtagaatgtcatctgcaaataacatgcaccacgatacctctctctgaatgtggtgcgttagagcgtcaatcactagggaaaatagaaatgggttgagggcttacccctagtgcaacctcatcataactgggaagtattctgagtctccccccatcgttctcactcaatttttagctccatcatacatgtccttaatagccttaatatatgcaataggaatatctctagcctccaaacatctccacagaatcttcattggcattttatcgtaagccttctctaagtcgatgaacaccatgtgtaaatccctcttcctctccctatactactccatcaacctcctaacaaggtgaatcgcttccgtggttgaacgtcacggcataagttcgaattggttcttagaaatagacaatttttctcaccctcagcttcactatcctctcccaaacttttatggtatggtttagtaacttaatagcccgataatggttgcaattttggatatcaccattgttcttatgcaacagatcatagtgctccatctccaatctttgggcatcttcttcatcctaaaggtgacattaaataattcaatgacacactccaagcctaccttacccacgttcttccaaaattctactgggatttcgtctgacccggtcgcttccctgctcattttacacatctgcaacttttatatgcctacaatacccaaagtcccgacgactctcagaatgttctaagccaccaagcacaatgtccctatcccccttttcgttcaagagtttataaaagtaagtctgtcatctccgtcgaataagtacctcatccaacaaaactctgccttcatcttccttggcacttcacttggttcaggtcatgggccttcctttctcggaccttggctagcttgtacaacttcttatcccctcctttgcctccaagttcttcgtacaagcgttacgttcaaacatgacaatcttagccgcagtaaccgctaacttcgcttccttcttagccaccttgtaccgctaggagagagagtttacaaaaagtgaatcatgatcgaatggttagaagtttcgttagcttcaaagaggtcaaccgtttgatcccagctcaacacaatgtaatcttttttataaatgaggcacaaaaattttgaaattttaaataaagattctgaggtttgaacatctactagaaaactaaggcgccagactcaaagagctacacagctatttatgtcaagttatgtcactttgttttgtttatcaatattttattttctgccttttcattatatatacatatttagttaaaaaaattaaaaaagaataatttaaaaaaaacgaccaagcagtgcacgtcacgtgacatcgcttggcctaaggtaaatccgcccatgtctacttatagtgactcaaaatgtttgttaattatattcaaaattcatcttgaattgcataatacaaaagatatttacttttataaactcttctgataatatttgcaaattattagagcgttacagagtgatttcaaggggaatgtttcaaatcttgaatatatggctgaaggacttggtgaattatgtcaatggaaggaactaatggtacatcaaagagaaaatggatcactatttgattcaccagccactactgcagctgccttgatttacaatcaacacgacgaaaaatgctttgaatacttgaattcaatcttgaaactacacaaaaattggggtatgcactactatcatctcaaaacattcagattatgtgttaatacttttcaatcaaattaatagatggagtgtaaataagaagcttcctatatatgttaatggtataatacaatccactcaggaagtggatttatagtccagattatggtatgtgaattcatgacctttctgccaaactaggtattttatgtacgtattttttaaaattgatctaataatatctgcgctctctttttttcaagtcggtagcattaatgttaccatgatatcaatttattcttggattgctggtacaacttactgtttgattgcatcctttctcttcagttttcttgatatattcttgttgtttccacttgttgccgctgcttctttttatcttgtcattagccgagagtttatcggaaacaatctctctgtcttcccaggataggagtaagatttgcgtacacactatcttccccagaatccacttgtgagaactcactgggtttgttgttgttgttattgttattattgttgttggtataatattatatgttggaccccattctctgaaaaggttgaataatacacttggttgaattgagttgcttatccaaaggaacatcgattgatttccacttaagaaaaatttctcctttctttaatggtacacccatattcaacaaatgctagatctctctctaatcctcccatctatgttgcttatattaactaaaatgcatttggggtgtatcgtatcctcatatttttggaagatccgtcatgaatgctacaatatatttagaaagtccgagcaatatagctttttccatagtactatttgtttactttgctaatatatctcctttttttttttttatagttccgactatctacccaacgaagatacattcgttgctttgcttggttgatacccttcaatgtgtaggagtagatcggcattttaaaacagaaataaaagatgttttagatgaaatttacaggtacatgttattgatcacaatgatatttacaatttctttaagcatcttgtatattgtaatagtggtcaattatttataggctttggcaagaaaagaacgaagaaattttttcaaacgttgcccattgtgctttggcgtttcggcttttacggatgagtaactatgaagtctccccaggtaatttgttattccgtcagtcattttatatgtcttactttgactctttaaaaatataaagaatatattttttaaactaatgattcttaagtaaaagtgtatataacattccaaaaatattttttgaatttttttattttaaacgtgtcatgtcattcatgtaaggcaagccattatataaatgttagaattgaaaatttattaaatatagaaaggtgacatcctttttgaaatagaatagaggttgcatagtacgtagttggccataataaattaattactaattcaatttttctttttgcagaagaactagttgaatttgtcgatgaagtacatttcttttcaacaagtgggagatttacgagttattttgaaattcttgagctccacaaagcttcacagttggctatttatgggaaagatcacattttggataaaattaataattggacaagatcttttatggagcaaaaactcctaaccaatgactacatcgacaggatgtcaaaaaatgaggtattacttgtaaaagactttcggaaatataatgatgcataacttgtcataatttatgtatttttcgtgaaaatagcacgagctagtcagttttcgggactggtaatcaaaaaaatagtcagcgtatgcaaagttattgaaaaataatcattgttttgctgaaacacgaaaagttacagcataatatgcgggattatgtagctcgtgcgtataaacttccagcatattatgttgaaactccagcacacagaaaattccagcatagtatacgagattatggagctctgacatataaacttcccgcattatgctggaagctcatatgtaaaaaattcgaactccagcatattaggttggaatgtttttggatttttaagggtgtttttgtacaaattttatctttacatgaaaaagtggctaaattttgattacttttgaaactgtggctatttttttattaccagttgtaaatctggctatttttttttctttttttttttcatccggggtctgatacctgctttgaagctctggctaatatgaatttgcaccgcgtaaggcccattaaaatgggacgcgctccttaccataatttttctttcacatgactcagaacctgaagcctctaactaaaagcatagaaattttatgcatctcgccacaaccctttgtgtggtatggcttgtcattattgttgctattgtggatgttatttgaaatgataaaaacaattgtattagcttgattttattttctccttaaaagctttagttttataaaattccattactaatctgagaaatattaggcagagtttgctttgaggaagttttacgccacatatggtcgagtggaaaatcaacgatatattgaggcatatgagatgatcaattttaaaatcttaaaagccgcttacaggtaattatttaagcacaatgatttataaatttatatttagtcttatttgttgattgttgttcaatctataagagttcatcttctcaaactcttaatttctcgctgttattaggtctcccaatattaacagcatagatttactaaggttctcaaagctggattttaacttgtgccaagcccaacatcaacaagaacttcaacaactcaagaggtatcttcacttttattagcttcattagatcttgtgattcttagacacgagggacgcaactataatcggcgaaagctggtcaggtgaaggtcccttgtcggaaaattaaactatatgtaagtcaaatattgctttaatagactttgtcattcttggacactagcacaatcataatcaacgaagagtcatcacttgaacaccctttgtcagaaatttatattaagtgtgtgtatatgtatttatataggtcaaatattgctttagtagactttgtcattcttggacaccacttaagattatgtgatctttacacaaatagccgtccatattcattgtttacattttctagccacacatagattatacacatataatacataaattatgcatatattatacctcagctggctatttttagtttaagtggtttggtgggcgattattttggttaattctccttatatgaatgtataggtggttcgaggattgcagactagaccaagtgggattgccacaacagaatttgtacactaatttcttcctgactgctgctttacttttcgaacctgaattttctgacgctcgtcttgcatgtgtaaagagcaccatgcttcttactttagttgatgattttttcgatggatttgttggcaaagatgaattgctcaacatctttgaattagtagaaaggtaaattttctgcttccatgcttataatatttccgcaaaaccccttctatatccatgtgctttcggtttgtcaaattttcttccactttatttgatgcgggttttcttcgatctcaggtagtccctttttactttttatggtcggtacttggacttggggcgtttgaacaattcgccttttttaggtctctctttaaattatgtccctattagacaagtggactatatatgaatgaatagaaatcatcaaactaattttaaaggcaaaattttatgggatttttatataaatagcctgttgtatttaatatttatttttcttagacggtatacataaaatatatgtgattatacatatattatatatatgccggctatatttaatttaagcgaataagtgagcagctatttaggttaattcttcatatattatatttatcttgctgcggtgttggggacgggtttcaatgagtggcctcaaaagaggccatgcagtgcaaattatcccttgggcctttcatttaacttctaacatttacgtgaaatagcatgtgctagctagttttcagactggtaatcgataaatagtaaatgtttgcaaaatcattaaaatatagccactaccctagctaaaacacagaaagttccagcataatatacttgataatgaagcccttgcatatgaactttcagcatattatgttggaactccagcgcaatataaaatttcagtacattatgctggaatcgcatatgtaaaaaattcgaactctagcatattatgttgaaatttgtccgaatttttagggtatttttattcaaattttatctttacatgcaaaagtggcaaaagttcaattactttttaactgacgctatttttcaattatcagttgtaaatcaggctatttctaatttttttttcagttgggatggtaattactcaacagtgcaatttcattcagagagggtaaaagttttcttttcagcactttacaaaactatagaggagcttgcagcaatagcaaatattaagcaaggtcaatgcatcaaagatcactttataaacttggtatggaaagagtatgattcttaaggtgtgtttggtatgacgaaagtcattatattgaaaaatgactttttttgaaggaaaatattttacggcgtttgattgaaaagtggaagttattttccgaaaaatatttttcttcgtaccaaaacacacccttattctttcattttcccataatgttcttttccatatttttttaattgtctatatttgttggtatagtggcttgatttgttaaagaatatgatggtagaatttgagtggtggagaaatcagacaacaccaagcatagaagagtatttgtctgtggcctgtgaaactattggtgttagatgcattactctcataacacaatgtcttcttgggccaaaactatcaaaggatgttttacagagttctgaaatgagtgccttgtgcaattgtaccagtatggtggcaagactccttaatgatgtaggatcttacaaggtaatattccttctaaaactactttatcttttctttgccaccaaaacatttgtcatgtgatcagtagtagcggagtcaggatattcacaaaatggcattaaaatagaaagaagtaaacacatgaaaagatcaaaaagattcaacatattagtgtatatacataaaaactaaaattttgcttagctatatagtgattttttttaagcgaagtggtataaattgacaccccttggacaaacgtggctctgccaaagtcttttaaaggagatcttcactcaaagggtgtggcttagcatcaataaagtgggtaaaaatcttgaaaactagggttcaaattgcaatagaaacagaatgttatgtgattttttttcatctgtttagactttggtgggcggagtacttaacgatacctttgttgatgggaggtaggaggtaccaataaaatagctgaggctgacacattaatttgcacacgccaccattaggaaatatatgcagggtaaaaatactacttctttagataacttctcaatataatttgccttattttgtgtaaagtatgggacaaattcttaggtttgacactacttcaattaagcatacaaaataagaaactaatttatggaactcactatggaataaaatttatccgcatctagtgtttacaccaaattaatagacttctttgacttacatatagctaattaatatatataatcaccatattaaatcacttaataatgctaagttatacgattttgtgtaaagatcgagtgcatgataatttttaccataatagtattgctcttctgatacagtagtatttggttaatttgctatatgaatacttgatcctctctcacgttttcttccagagagaagaagcagagagttcaccaacaaatatagtctctatattaataaatcagagtaaaggaacaatctctgaagaagaagctataaaacatgcaaaggaaatgctggaaaataagagaagagagttgctggggatggttctaactcaaagaaagggaagccaattgccacaagtgtgcaaggatattttttggaagacatgtaaatcgtcttatttcgcatattcagatggcgatgagtttcgctttccagaggaaatattgaagaatcgtatcaatgaactactttttaaaccactcaagtcgtaa

SEQ ID NO: 134 - DNA, 1584 bp, Nicotiana sp.
atgtcgttttttgcagttattccattctttctatttgtgttttttattttcagattatatttcccctcatccaaaaccaagaaaaatcttccaccatctccatcaaagcttccattaatcggtcacttccacaaactgggcttacagcctcaccgctccctacaaaaactatcaaatgaacatggttccatgatgatgcttcagttcggtagcgtacctgtgcttatcgcttcatcagctgaagctgcttccgaaatcatgaaaacccaagatttgtcttttgcaaacaaacccatttcaaccattcctagcaagcttttcttcggcccaaaggacgttgccttcaccccttatggggattactggaggaatgccagaagcgtttgcatgcttcagcttttgaacaacaaaagagttcaatcttttcgaaagataagggaagaagagacttctcttcttctccagaggattagggaatcgccaaatagagaagttgatttgacggagctgttcgtctcaatgaccaacgacatagtttgcagggtggccttaggaaggaagtattgtgatggggaagaagggagaaagttcaagtctttgctgttagagtttgtggaattgttgggagtttttaacatcggagattacatgccttggcttgcatggatgaatcgtttcaatgggttgaatgccaaagtggataaagtggcgaaagagtttgatgcatttttggagggtgtgattgaggaacacagaagaaaaaataagaagtcagacactgaagctgaaggggcagacttcgtggatatattattgcaggttcagaaagaaaacaaggctggttttcaagtcgaaatggatgcaatcaaagctattatcatggtataaatatatatcactagctatttctctcttatgtaattacactccaacgaacaaactaaactaaaagagaaaactattaattgtttgttgcaggatatgtttgctgcgggaacagatacaacttccacacttgtagagtggacaatgaacgagctcttaagaaatccaaaaacactaaataagttgagagatgaggtgagacaagtgactcaagggaagacagaggtaacagaggatgatttagagaaaatgccatatttaagagcagcagttaaggagagttctaggctacactctcctgtgccgcttcttcctcgagaagcaattagggatgcaaaggttttgggctacgatatagctgcagggacccaagtcctcgtatgtccatgggcaatctcaagagatccaaacctttgggaaaatccagaggaatttcaacctgaaagattcctggataattccatagattacaaaggcttacatttcgagttaattccattcggtgcaggtcggaggggttgtcctggcatcacatttgctaagtttgtgaatgagctagcattggcaagattaatgttccattttgatttctcgctacccaacggagctaagcctgaggatttggacgtggatgaagctgctggaattactgttagaaggaagttcccccttttagccgtggccactccacgctcgtga

SEQ ID NO: 135 - DNA, 786 bp, Nicotiana sp.; identical to SEQ ID NO: 121

SEQ ID NO: 136 - DNA, 3194 bp, Nicotiana sp.
  modified_base (2264)..(2264): a, c, t, g, unknown or other
atggatcttaggaggtcaggaaactacaaacctagcatttgggaagatggatatgtccaatcacgagctacattttacgctgtaagtccgaattaagaaaaaaaaatatagttagctgctaatcttctgtctttgtatattttctaactaatttaacatatatacacaaacagtatttccttaacaagctatttactgcgcttctcttatattactaaataggataatatatatactgacactgacctattgtataaaaaattgtacactgtcaatacatcgaagctaaacccttgtgagaaaactaagtgtatattatcaactgatggaacaacttctttatcaagcaggaagagaaacattatgaacgagctgccggactaaaagaagaggtgaggagaatgctagagaaaacgatccacccattggaactacttgagctcgttgacattttgcaaagacttggtttgtcctatcactttgaggaagaaattgatagagttttgaagcaaatgtacgttaatttttgtactacaaatagaaatgatgggcagaagagcgaagatttgtatgctacagctctagaatttcgactccttagacaagagggctatcacgtccctcaaggtacttcaaaattttctctacgtttacttttaccgatttcatctaataatttataatgctgtttacttagtcccccgaatccatctcaggagaacttaaccaaaaaagataaattaatttttttttcttttaaagaaagaacaacataattgtagcgagcataaagtttttgcacatatcttcttgcatgcactacaagaaaaatgagatggtcttacgtgtcggacaatatctaaagagtcttttgagagtcggcagtaaaagtccgtttcccgtagttaattgacactatatcacttaaaaattacactttgtcgataagtaaaaaaaattgtataattactatatatattgaattttcttgaccttttcgtttattgacctctttatattttaattttccttagtggaaatctcagctctgccattaatagcaagtaatttaagatagcatgtttttatgtttgttcttatgtagattcctttcttcttttccagagatgttttacgctttcatggataaggaagggaagttcaaaacaagccttgttgtggatactaacggactgctgagtttgtatgaagcttgctatctttgtatggaaggtgaaagcattttggaaatagctcgagatttcaccactcattttctcacggaaagccttaacaagaagacagataagaatcttgctgagcaagtaagccatgctttagaaatgcctttacattggaggatgcagaggctagaagcaagatggtttatagaagaagtttatcacaaaagagagaacatgaatcctcttatacttgaacttgcaaagttggactacaacatggtacaagctacatacttggaggaactaaaacaaatgtcaaggtgagatggcgttgcgtacgttaaagattgcgtacgttaaagaggcagatacagaatttagacattataggttataagttgagagagtgagtattgatatggatatccaactatatatgcttctctatcgaacctgcaaactcatggctagatccatcactgtggacatgactttggaagtggcacactgttgaatacacacaaaatacgatttaattttggtatactaaaatattttcaatcctgaaaactttacttgaagatatgttttaatctgattataatgcaggtgggataagaacattaaacttgttaaaaagatgagctttgttagggacagattggtggagggctttttatgggctgttggtttcactcctaatcctcagtttggatactgccgaaagttttcaacaaagctttctgtattcctcacaacaattgatgacatctatgatgtttatggcaccatggatgaacttgagcttttcactgatattgttgacaggttagtccacatactttaggcctttttcctcttatcccaattcttataaccgtccataataagtaagataaatagcctagaaaattaaacaagttacctcctactacaacctaaaatacattgatagtgtgaaaattcattacactgtcagcgtatataagttagatccttttttcccctttatttggatggtcaagggggtagactggactggaatagaatatcgaatttatttatgatgaggggcatatntttatttttgatgaggggcataaacttattgtggttacatgttctgaagatgggacatcaatgcaatagagcgactacctgactacatgaaaatctgcttcctagctctcttcaactccatgaatgaactggcttatgatattctcaaagaacaaggcttcagcataatttcacatataaggaagcaggtagcaattttttcttcccagtaatttatcttgaatttctcatctcctcctcttcattcttactgacttatacatttgacattttttcgtaccaaatatttcagtgggctaacctatgtaaagcctacttactggaagtgaagtggtaccagagtagatacacaccaagcttgaatgagttcctgagaaatgcatggataacaaacactggtcctgtactaataatgcatgcttatttttgcatcacaaaccccataaaggaggaggaactggaatgcttaaagaattatcctgctattattcaatcgccttcgctaattcttcgtcttgcaaatgacttggcaacttcacctgtaagctatgtttatatacaatttctgtgcaaggtcagtaagttctagtatgatatgttaaacaattttttttttttttaacctttgttcaggatgaaatcaagaaaggggattatcttaaatcaatccactgctacatgcatgagtcaggaaggtctgaagaaaatgctcgaaactatataaagcaattaattgatcagacctggaagaagatgaacaaagatattctaagggacagctccttctcaaaggattttagaacaactgcaatgaatcttgctaggattgctcaatgcatgtaccagcatggagatggatttggaattccagatcgtgagacaaaggatcggatccgctccttgttctttgagcccattcctctttcatga

SEQ ID NO: 137 - DNA, 1508 bp, Nicotiana sp.
atgcttcatatgattggtggagaaccacaccatgtccttagagatttagccaaaaaatatggaccacttatgcaccttcagttaggtgaaatttctgcagttgtggttacttctagggagatggcaaaagaagtactaaaaactcatgacatggtttttgcatctaggcctaaaattgtagccatggacattatctgttataaccagtccgacattgcctttagcccttatggcgaccagtggagacaaatgcgtaaaatttgtgtcatggaacttctcaatgcaaagaatgttcggtccttcagctcgatcagacgtgatgaagtcgttcgtctcattgactctatccggtcagattcttcttctggtgagctagttaattttacgcagaggatcatttggtttgcaagctccatgacgtgtagatcagcatttgggcaagtactcaaggggcaagatatatttgcaaaaaagatcagagaagtaataggattagcagaaggctttgatgtggtagacatcttcccttcatacaagtttcttcatgttctcagtggaatgaagcgtaaacttctgaatgcccaccttaaggtagatgccattgttgaggatgtcatcaacgagcacaagaaaaatcttgcagctggcaagagtaatggtgcattaggaggtgaagatctaattgatgtcctactaagacttaagaatgatacaagtcttcaatttcccatcaccaacaacaatatcaaagctgttattgttgtaagtactattgaatactatatatgcttatacttactcccatatccattgccatagctaaaagattttcaaaatcctatcacaaataagaaaataatagctttgccattattaatttacaggacatgtttgctgccggaacggaaacttcatcaacaacaactgtatgggctatggctgaaatgatgaagaatccaagtgtattcaccaaagctcaagcagaagtgcgagaagcctttagggacaaagtatcttttgatgaaaacgatgtggaggagctgaaatacttaaagttagtcattaaagaaactttgagacttcatccaccctctccacttttggtcccaagagaatgcagggaagacacagatataaacggctacactattcctgcgaagaccaaagttatggttaatgtttgggcattgggaagagatccaaaatattgggatgacgccgaaagctttaagccagagagatttgagcaatgctctatggatttttttggtaataattttgagtttcttccctttggtggtggacggagaatttgtcctggaatgtcatttggtttagctaatctttacttgccattggcccaattgctgtatcacttcgactggaaactcccaactggaatcaagccaagagacttggacttgactgaattatctggaataactattgctagaaagggtgacctttacttaaatgccactccttatcgaccgtcgagactaatttag

SEQ ID NO: 138 - DNA, 8327 bp, Nicotiana sp.
  modified_base (6344)..(6344): a, c, t, g, unknown or other
atggcgtctatcaccgcaaaccatacattttcccgtaaccctaacatctcattgcatccccaaaatcctctcattcaaacccaagctctcttcaacttcaaatcatcaatccccaaatgttcccctattatctgctgcgcaatccgccgtcgacccgactataccccgagccacattcccgacccgaaatacatccgcatcttcgacaccactctccgcgacggcgaacaatctccaggcgccacaatgaccacaaaagaaaaactcgacgttgcgcgtcagttagctaagcttggtgttgacataattgaagccggttttcctgcttcttctgaagctgatctcgaagctgtgaaattaatagcgaaggaagttggaaatggtgtgaatgaagagggacatgttccggtaatttgtggacttgcgaggtgtaataagagggatattgataaggcttgggaggctgtgaagtatgcgaaaaaaccgaggattcatacgtttattgcgactagtgagatacatatgaagtttaagttgaagatgagtagagatgaagttgtggagaaagctaggagtatggttgcttatgctaggagtattggttgtgaggatgttgaatttagccctgaagatgctggaaggtttgcactttacacttccattttgaactttccaaaatgattgaaaaatttaaagttattcaacttttcaggtattaaaaatttaaactttgatgtgttaatgtccctgttacactaacttacttattaaccattactttatttattttttcattgtcagtagtatgatatattgtgtaagataatatttacatcaattaacatttaaacttcgtgccccatcaaatactgttgtatacatactttgtgttatcatttcacttcatataaccacatccctgctagaattgttgattctgaggccttttttgtgtggtgatgcttattaaatttaggcaatccaggaatgtcccttttttttttttgataaagtaatcaaatttattaaaaaatagcaaatatcttcccatgtacatgaagtatgcccaaaagcagaaagctttcaaaataatatgattttctaattaacaacactcaatcttctatgcttatagggatctcatggatgcaccaaaaagaaataagggataagatgctattttttttatttctcttgtggatgagtcatggccattatggtcttatagctggatagatagttttatgcttaaagatagttatatatagattcagataaaaatgattagcattttagctggtgaatcatgaatgatccttcagaattctgtaaagtttctggagatgatcttgtcacaagtctgttgacactaaactggtttttaatgaacacacttgttcattgcattcttctctattagcgtgtgtaagagcgtgaaatttatgctctgttaagttgccttttcctattaaggagttttctggtatgatgctttgagatctcaagtaagaggtttaaactacctactatttttctattgtcatgcataaaagctcgtggactagttcagtgattaaaattggcaatggtaaccactttcatgcatttctgtagcttggatctgttgccgtcattgtattctgaactgagccttatttcctgtttattcctctcagatctgatcctgagttcctctatcatatccttggagaggtcatcaaagctggggcaacaacccttaacatccctgatactgttggatacactgttcccagtgaatttggaaaattgatcgctgatataaaggccaataccccaggaattggagatgtgatcatctcaacgcactgccagaacgatcttgggctttctactgccaacaccttagctgtatgcagttcaatgttgtttagaacctagtggtttataccaacttaaactgtatgttcattaaagtgtgttcaatttcagggagcatgtgcaggtgcaagacaagtagaagtgaccatcaatggaatcggtgaaagagctggaaatgcttctttggaggaggtgtgtgtgggttcttcactgagaaacttcagttctcttatgtgcatgatttgagctccaaaatttgaggggtggtaagaggtggaatcactaagtatacaaccggactatgagttcccctctattctttccccgtcataaagatgggtcttcaaaatattttcccatagcactgtaaggcattctctgcacaaaaggaactattctacctcttcctaaacaattaacatcttgactttaaactgatatttttcttttcgagaaaggtaacaatgtattatcatcagcacaaaggctgtgctggactatatttacagttcaaaaacagcaaaaatgctcttgttcatcttacaaggactctattaactcaagtaaaggctgagcatcttccaaaaatctctctttacacaaaaagtgaaatgaaaatatacaatcatcttgattttaagagttaagacagagggaggactttctttttgaccatatcctctgtagcctttagacgcattggtccataggtgtgacactatgatgattgaaggtgataaaagcggaaaaagtagaccttaagtcatagaaggaagttatatcgaaagtcctccaatctcgcggaatcaatttgactagctatgaaatattacaactataagtaaaggatctatataggcgatatctagtttgaattaatgtttagctgttattattacactcccttaaagtagttgtttctcgatgatctttttttcttctggttagaaggcttgtatgtccctgtagagataaatgtgaaacttagacacctctggttttagataaacctactttgtgttaaaagtcaaagtttgaacaaagtgaatgggtatagcatattgatatggctgaacccaactgatttgggattgaggcatagttgattgatgatttccttttgttgaagttagtatttcctatgcctcgcatttggttgcctttcctctttggattgactattttccacaattaaaattatgccactcacttctacggtgcacaagttttctacttctctgaggctaagaaaaaagcaaactttatagtgactacagattttcatttatccttttgaaactatttaatgtcacagcgagacatccaattttggatgaaggatggaatttcatgtgctatcatagtatattcctctctctttcccgtatgttagcttttcactattatttattaggtttggttttgctcatcctttatggcttgatcgaccatctatgtttctaactatttgaaaacaatagttgcaaacttgcaaccaaattttgaagcaaatttctgctattggttgtgatgtgttatgttgaaacggacaactactaacttgtatggggttcttttgtcctctgtgttgcttgttctgtttgcttttcctcttgggcattttgggctttcattttctaacctgttaccttcgacaatgctggaataggttgtaatggccttaaaatgtcgtggagagcaagtactaggtggcctgtatacaggaattaatacacaacatatactcatgtcaagcaagatggtttgtcccctactatcttatagtctctggagatattttgctggttaatatctttctgaagcgccttctgctgacccttttctatgcaggtagaggagtacaccgggcttcatgtgcagccacacaaggccattgttggagctaatgcttttgctcatgaaagtggcatccatcaggtctgcgtaattttgctctaattcattgttgaaagagatcaatgttctaaaccctaaacagttcttgaaagaggcaactcaatcctcttattagttcaagggcatatttgcttgaatgttaatttttgctttattctgctttgactaagcacaaaattttgctatttaagttgaaaatagatactctattcatccaataagttctgtaacttgtattaccttgctttgagcaaagacttttttttcactattccctcgggtaactgggtaagaacaaagacttttttcttgcacaaatcctataaacagtacaattatccgcagacgaagaaaacaagtgagcataaactatattatcttttatcttgtcgccctaaaataacagagatttcagaataggtctgattctggttactaggttgctgaatctgacatctacaaaagcataatatgggagctgttttaagagtaatttgcggatatacactgaatagtgagcagcattatcaaaggcgaaaagcgcaaaaaagctctaaggtccgttgggtctttaagtgcaaaacgcaaataaagcgtgagctttaatgaaaaaaggcgcaactggagaaaaagtaaaaatatgaatatgtagtacaagactaataattataaacatgaataacaaatatatggacaaagaaattggaacaagattacgataaagtgaaatatcaattgtttaatgttgccttttcatgattacactcattggcaaggaatagtatgcctgagagccttgatgtgatactaaagcgcccacaaagcgaggcgaagcgctcaacatgttttgagcctcgcttcagggcttaagcgcacctttgacaacactgacagtgagttgacgcaagagtttaagagaatgaaggagaagcagagaaggagaacagaagaagggaaagggattattagatgcttttgaaactatcattaagagctgctgaaagctcgaggatacacaatatctttttattctcagtgacatgtctaaaaatttgggacaatgcgaagactatagctttctttgctggtatgtcacagcttttcagttactctgaaaagttggctctgttagcttgaagggttgttctccaagttttaagcaacagctcacagccaatagaaagacttttaaactaaaagagaagcctcaaagtaccaacaaaccactagaaagtagctccaagtattccttcttggggcattagatcattgtagacattggtgagcatattccaggaaggtcagagatcttatacctcctgacatagaatagcttcccttcaagagtttgaatccacttactctttcatttttcagattatccatttgcttttggcccttttcactttagatgcgtagttattattcctatatttggatatctgtgaataaatctgccacatatctagttagagatttgttagttgttctgtttgcatctgtttttgattcatcttgaactgcataaagtgtttcagttgaacatctttgaaaaaatgtagtatataatgtctcccgctcccttttcttgcctcaaagctggattctctacctttttattattgtaaggttgtgaagtttaattaattcagttgttctttttcaaactctttagcttaaactactttgtggtctctaggatggaatgttaaaacacaaagatacatatgagattatatctcctgaagatattgggcttaaccgagctaatgaatctggtatcgtcctcgggaaactcaggtatgtgattttccaatcagtgcttgttgctatgatggcataaatgttagatttctgtgctcttctagcttttgcttattatccgttaattattgaacttgcttagatttactacatcctttttgttgctatggaggatatatttctgtagtactcgaataaggcttcctgatcaacatactgttgctgtttcaataatgaatcacatctttgttgttttaaaatactgtagaggtctttaggaacttcctctcttctcatggagggatgaagtagaagaagcttattgagtttgcctcactataatttggtcagagccaccgttgcatcagataatcatcatcatagtctgtaccattgtccctcccatgcctccctctgaacctgcactattcatcatttaaatctaattgcttcattcctataagaaattaatacattgaacatttttgtgtagtgggcgtcatgctttgcaagccaaaatgctcgaggtaaattgtatgccctggaattgagtttatttcttatatttaagagcatgaaacaaatactttaatcctgatgcagcttggatacgatattgagggaaaagaacttgaggacctcttttggcgattcaaatctgtggctgagaagaaaaaggtgaattacgttgttgaaatttccattgttgtaaggtatatttacattgtcattcaaatgcctgtggagatgccccgtggtgcagtttattaattttgcgatgttgagaagctttttttgggggnacgggctaaaaatataattatctctctctctcagtaatcattattacgtttacaaagtatgtcacatttttttgaacaagacgaagtatgttgcatcttctaattttattagttgtagtgttttctttatctctgtgtctgggttgtataatcactcgtgtgaacctggaaacaactgggtgtgtaagtacttctaaaatgctgtaaggtgacacgaattaagtatgagaaaaggtggaattgagagagaaacagatgaagaaaatggagggtggatgtgaatgaaaaagtcgggtggtaaaaatcttagaaatgactcctgaaaattggtatggtccaactccatgttggttataaactgaagtgtaaaattttcctattataccttgtatattataaaatacccctcttctcgagctggggtaactgacaaatttgtgctaggaccttttaaatcatcttttccttgtgcaaactttcttctgctcatttgaaagggttatctggctaacttttatcagttcaatttgaaactaaggttaagctactgtgtggatctaatatgatgttgatatcgtggatatgttttttgaccatctatttatctcctactgctcattcagaaaattacagatgatgacctgatagcattgatgtcagatgaagttttccagcctcaatttgtttggcaactcgaaaatgtacaggtaaatgtcaatgttgactacatttacattggttttatttaattttctgacttaggtctggattggaaaggatagttcagctgatcgaaagagttcctgttcgatggacaggttacatgtggaagtcttggcctttctacggcaactgttaagctcattgacgctgatggtcaagagcatgtttcttgttctgttggaacggggccagttgatgcggcttacaaggcagttgatctcattgtgcaggtacctgtagcactccttgaatattccttgaatgcagtcacggaaggtatagatgccatagcttcaaccagagttttaattcgtggggagaatggccatacatcaacccatgctttaactggagagactgtacaccgttcttttaggtatgaaatgtaccggccatgttgtttcatctaatcttatttgccatctttctttgatagaacataggaaatacggagggtgtgttggtgaattttggaatcaaggacatgacacggaagtgaaatgagccaaagtgatatgttttttctataaagctaactatgcataacccagatttagggctaacacatgaatagaaaaatgctgtatgagaactatgatcgatagcagacgtggatatttaaatggaagatatttgcatagcatgaatatatcagctgaagcatagccatagtagacatcagattcatgtttctgccactgcaacatctctcccctcctcttcggaaatactgctcccaacagttatccctgtacccccaggtcctttctccaatctttatttcgtcatttgacttatccagagggaagacctgtgtcagtgtatccagcaagttggggagttaaacttcatagtagaccgacatgattggctggatgtcaaacatgtacccggcatattttcgacctacatatagctaatgcacatacattatgttttctggcgagtccgtaaattattgttttttaccgtaaattattgttttttcttttctcctattagaaatgtcttatacgagttgtaaattctggcttccagtacagactctgtgctgatgatttgattgatatttgggatatgttgctttctcaaccaaaaaagtcttatatgtctactctcttcttccacagtggaaccggagcagatatggatattgttatctccagtgtccgagcctatattggtgcattgaataagatgttgagtttcagaaagctggtatcgaaacacagcaaacctgaaggcagtgcagtcgtatag

SEQ ID NO: 139 - DNA, 10935 bp, Nicotiana sp.
atgctatttgcaaggggtttgtctcagatttcgagacgcagtatcaatagatatcaatggctatgtccccagcaacaacaatttcaccattccaatcactttccctctcccatcgatgcttctcataaggtgaaattaatcttatgtttttccttcttttttttttttcctgagttctgttctattagttactgttactttttgttagctgtgattgggaatggatattgtttttactttagggccttgatcttcttctttttttaccgcccagaaagttgatagttgcgctgaagtttgtattgggatcatgtgattttattttaaaaattttccaatcaatcaaccatacctcaatcccgtttgtcaggattggctacatgtgtctttttgataatggcggtgtctgggctagcttatacgcaccttgactaattccataggctacttgttacctgctatctcaactatatgtgtgttggtttttgctctacttaggtctatttctttctaatatggtgcaatttagactttagtaggattgtaggaaatgttaagctaataatgcactggttccaaccgaattttgagctacacgttgttgtgggtgggggtttgggggggggggggttgacactggtgcgacagtccatttaggggtttagtgttgcactcaaatgatatgctcaagaacattattttgtggtcagggactcctatggttacatagcgagcatgttccaacatactttgaattatgagaaatcattataaattgactactttatgtcggttgtcaacctgccacaaccatcctcctttatacgtgtttgagaccgtcaacatgagttctcatgtgtggagttaaacttgaaaaaggaaacaagaaaaaatgaaaggaaggatggacaaaattagttatataaggttcaattaggtcataacttgcacctttctctagttatttttcctttaaatgttctcttcctgggcaacgagtagagtgacgaggatgttactcattgtattggagcggggtggatgaaatggaggctcgcttctggggtcttgtgtgataagaatgtgccaccaagacttaagagcaagttctacggagtggtggttagaccgactatgttgtatggggctgagtattggcctgtcaagaagtcccatgtgcagaagatgaaagtaactaaaatgaggatgttgagatggatgtgtgagcataccgagaaagataagattaggaactaagttattagggaaaaagatggaagtggtctctgtggaggacaaattggggaaatcgcggttgagatggttcgggcattgaagaggagagacatagatgcccgattaggaggtgtgagaggttgaccatagcgggtctgaggaagggtaggggtagaccaaagaagtaagggggagagatgattaggcaagacatgtcattgctttaacttaccgaagacatgaccctcgataggaaagtgtggaggtcggcaattagggttgaaagttgacaagtagtcgtgacaaggtggaggtaagatatgcgtacacattactctcctcataccccacttgtgggattacacagaatatgttgttgttgttgttgttaattttcaaccatgtgtagaaagatataggaggcaaggcctagtgcttgccagacttgatatctctctttcatccccttcccttgtttccattttctctatttttggtgtatttttagttcatctcttagcttaagaaagatagtcaatattaatgtggtcttctttctgattcttccagtcattttttcttgtaagctctgtttcaaaggttacatagtttaattgctcaattcgctgctgttattgctaatttgtgactttttatgctttattatgattgtttttggtgattattaggttttgggttgcagagtaattcattcatgggtttctaatgctcttagtggtattggtcaacaaattcatcatcaaagcactgctgtagcagaggtttgtatagtattttatttcttaaatctacagttatcatgttatgtccagtgtttttgctaacaccgtatttcaatgtcattcctcttagttagcttcctcactgatggatcttatggttttttcatctgtaatatgttgtgatcgagtatttcaagaaggaaaattgatgacatggcctatacaattgtaaaattattagcagttacttctccatatttaagtcagagtatgtggacctgaagggccttttctttattcctttctagttgtcttaccttatttctggatggcaaaactgattcaaaattgtacctaaaactttgcactagtggatgaattttcttgagtcgtgaatgactcttgtctgtatagttatgttcagctgccactttaaggacttgtctgagtagtttgaggttctgatgcaaatcatcaactcttatatttttctatcttgttcgttcctcgggttttctttttaaatcccatcctttatgtaattgccaaaggatgatgtttttcccactgtttcctattgtctttctctcaggagcaagtggacccattttcccttgttgctgatgaattatcccttctgacaaacaggctgagatcaatggtagttgccgaggtatataactttttccgtggttaggcgattgctaaatccttgatgctagatgacaacctgtttcatttgtatacaggtcccaaagctggcttcagctgctgagtatttcttcaaaatgggagtagaagggaagaggtttcgacccacagtatgatttgttactcccaagctcaattttcatgtgtactatacattcaaccttagttcggtgcacaagcttttgcgcattccaaagaaagaaactttcggtcatcaagtaattgttaaaaaaacaaaatccacatttcctgtaataaaggctgcatagctttggaaaaagtcacgattctctaaattaccgagtatcttccctttaaaatactgatgaaagctaagtgactgttgcttagtgaaaagatatagacatttggttttgaaatagcagagatgtagattttgcacatttctttctgaaagcttaaaacatgtttctcctgaaaaataaggaagaacaagaatttccctcagttgcatttacagtaggctcaaacatgacgctccagcagaaattaccagactgagaatccaacattcacttgtcttttgcttaaattgtagtaattattggacacgtcactttttggacacagctttggatgattaagttctgtaatgttgaaattatagtataaaatggcatcaaccatatagttagagccttagaggttaagatgacaaagtggtttgaagccttgcatttagagtataagatggcatcagatagaaaattagaggttaagatgacaaagtggtttgaagccttgcatttagagtataagatggcatcagatagaaaattagaggttaagatgacaaagtagtttgaagccttacgttttggaaactaagatgtttggagacaagtttctggtcgaaggatgtttatccctggacagatgacaaagtggtctgagatttacgacaacatcaaccatatctgctgctttcttcaggagagatgacataaagcttaagctgcaaaataaaagaatgtgaatagaacagggataaacatgaaaaactaaagaaaccgcaacagctggcaaaccaaaactaaactgaattgtattatgtattaactacttcggccttcttttctctctttctatttgtttgcattttagttgaatataacagtttcatgttatatatgagcaaaacttgaggaaataattctctatttattagatatgcaatttttgatacatttactatctaatgagcaatggttttcattttaaggggtacgaattgaagcttttgtattaattgaagtccttgtatttccaatttaagtgcatttgtggtggcaatacagatagcaccctcttgaagtattatactttggtggtgcttcttgcgtgcgttaagtggttattgtgctgttgcttggccagatccattgtaatgtagattttttcaagtttgtttcatgtcaatgtagcattcatttttcagttcatgatttcatacatcgtcaaaagcaaatacacgatgcactttgttgtaggttctgctgttgatggcaacggcactgaacgcaccggtacttagaccccaggtggatgttgattctttgtccagggatttgcgtacgaggcagcagtgtatagctgaaatcacggagatgatccatgtaagtattctatctctttttcctgttaggatggaaagaccatcagttgggttgttagatgacaaaattttaacactcaagttcttgatgaattattatgttctggactttggtacaagtgtcagatacaacacagatactaaatatgtacacgtacaacttaatatgagttaaatgggtattttgaaggttgcatacaaaagtaccccgaccaatgcaggaaaggtaaaatgaagaattcagataatttagatgaactacgcatataggggatatgtgtagatgttagattcatgaaaaagaactcatatataaacccgattggtaaggaagcaacacggaaacgtggggtataactgatatatctcacctgatttgtaaggaagcaacgggaggatggagctaaaagagaacttccacatagtatgataagtactaatttacccataacaatgcatcaaagaattgcaattgctgggaaaacttgggagttctgttctgaatttgaaggacagctgggggatgttaatttcttaaagggtggcagatcatgtctttcttggggaagggtagagatgcagagttatttgtgctggtccagttagttgaataaggctgaccgctctaggtttttattttttaacaacaaagcagttgcagctgccagctgttgcccgcttgtttgattttctttcgtatttatggggagcaagacaaacaggtttctcttcttctttttcgggtcctttttccttagatgctcaatgggccaacaacttggcatggttgacgcagatcatatgaatgggcctacattcagaaaaacctgcatggccacttagttggtgtttcattttctctcctctagttcagattagtttattaagtctcaaaatgccatttcattacaactttcttcattcaagtttcttttttttcactctatcgtaggttgccagcctactccatgatgatgtactagatgatgctgacacacgacgtgggataggttctttaaactttgtgatgggaaataaggtacgtggtactttcttttccgaaatatgctgtcccctgttagagtcttccatataatccaagcaagcagatgttgcagtagtgagatggccgttgttcatatcaatacttagatgaagcaagtataaatttgttatctttctgttccatcttaaaggacgctatttaattgacgaaggagtttaagatgttatttgacttgtatattattttaatagcagcagaagaaaatatagattgacgatgaaaagttagttcaatagaaaaaatatcatatgaaagtttaacatatagttaaataagtcgaattcttgaaacttgtcaaagttgtttagaaaaatactattaatggaataatgtcaaacattttgaacgtgccaattgaaaaacaaatgttgtataaattgaatcagagggaatatcttagatccctgagtagaacattggatatgacatgcttactgcaggcagcgtaattttttccttctaattatgagattattgaaagcagtcagttttaaattatggtaagccaagtgataaaggagggtcaggactcatgctttcctcttgggtggaagagcaattttcatccgtgggttatatttaaccaaagtaactgctataatatctcttctcctatttaatgcagttagctgtactagctggagactttctgctttcccgagcgtgtgtggcacttgcctctttgaagaatacagaggtataccttgtttcctcttggctctagtaaaacattaaatatttttgcagaattaacaagagtggaaccatactgttcataatactcttgttattaaggcttgttagtttttatgttctattcctatttatcagaagtttttctttttctgtgggatatatatcattctacattcttttgtatctaaaaatttctcgatggacaaaaataagattttattgtgtctagtattagggttttgacactcctttaactattgaccgcttgtggttttatgtattttaatctcttatggttggtatttttttgtcacttgatataaattgtatcgcaaactcgtaaaactcagggttttgcttttgttttttctggtccagcaactctatataggtttttcttttcctgtcggtttcattcacgccgcttattttgcgtctcctcaattaaaaaaaaaaaagaaatagacgaaaaatagcaacaacagcacagggaagggattctagctagaacactgattttagtttaagatttctgctattttctgttatacctcttgctatcctctcttcagctccgatactcagatcttgtgacttgtaggttgtatcccttctggcaactgttgtggaacatcttgttactggagagacaatgcaaatgacgacttcttctgatgaacgttgtaggtatgctggttcagtgctgattagtttttgatgtaccctgattgaaattaactcaactgaaatgtcataaatggattcgacatttgatcttttcgctgagataaaggcataaaaatcagaaagaatatatagaattagaatcggatatctcgagatattagaaagtttcgtgggttcttaactagaaattaggtcttccccaatttagttatataaattcttagatcagacttataaaatagtagagtctgatttattcaattaatacctctaataacaacaacaaaaaaacccagtgtaatcccacaacatggggtatgggaagggtaaagtgtatgcaaggttgtttcctatagacccctggctcaaggaaaaaaaatgaaaaggaagcggaaacaacaagcagtagcgacaaataaatacccctttatgtatgcaaataacgctctaagttgattctttcagcgagtagctaactgcagttttagtatgttgcttctggtattttactttctggtgtagtgacaaaaagagagaagggagaaaggaagaggaagaggaagaggaagaaatagtaatgcggagagcggggagagagtaggggagggggtaatgaagggaggaggaggaggggaaaaagagagattctaatactcaaaacaattcctcaggtgttcctccgatgttcaaacaacatacataatgtcctattttttatgttacacgggttcatttatgggtacatatggatatccgtgtctgcaaatctgctagaagtattcacacccatatcataacctacacaagtacgtcaaggcatacaaaggatccgaataccatagcctattgttggaatagggaatcttgaaaggctggaaccactttcttatgaactttttgataatattaataaagcagagtaaaatagaagaaatcaagaaggataggtaattaagatgtggagtatgagaaaattaatggacaagggtttttccttcttctttcaccatcttttgtagaattcgagatttttctttttctcttttatttatttaatttcttgtatcgtcggtttagtagaagaaggggatccagggttaaaattgctggtgacataaaaatattagaacagaggatgggataaatttgaaccgcactttaggaacaacacctctttaagaaatgttaagcctgtgagtcaactcatcaaagaaaaagctgcaaacagagaaatatgaatgaaccaaatcataataaatttctttgataagtgtgctaatactataagcaaaaggatgcttgcagatggagaaaataaggctgagcttgtatgtctctcaaggacaccacattaaatttaaaattttgggtgttaggcatcatgtctctaatagatggggtattttgtgtcagttgatgcatactaaacatgcacttttgcctagctttctcacctgatgccttagctggtcagagtatatactaacttcagtaatatcatctctgttttaggacaccaggtgttttactaattttccccccaatagttgcaaaaacattcagtatgagatggagggttgtgggatcttgaaatgtctaattttggtgaaaaggatgtcaaagggacgtaagcttgtacctcatgtcatatgaaacatccatgttagttggtgcagttttaatattaggaaatataggggatttagcacctctgctgtttatgtagagtaaacgtgtcttgatgacttgtgaagtgcgtcatgtatgcattgtgctaaaggttgcgtacaatctggtttactatctacatccacttgtttgttagatttgttttgaccaacctttctccgaaattaatgttctccgtcatcttttgcagcatggattattacatgcagaaaacatattacaagactgcatcattaatttcaaacagttgcaaagcaatagcgctacttgctgggcatactgctgaagtctccatgttagcttttgactatgggaaaaatttggtctgtgtaatcttctacattctatttgacttaatatatcacttaatggtgtaaagggatcagcaggacgtaataaaaatagttctatgttccgaccttttctccattgttgctatcgtggtggaaatagcatgtaaatactcataagtgactctatgcatcttcgacaatctgaccactggtagaaatttcagtttggcgggatatgcaatttccttgtgattgtgcaaataagacctgtttaagtagtttacctttttttttttcccggtgataaggttccatagttctgagttcttgttttctatgtctattcatgcagggcttggcatttcaattaatagatgatgttcttgatttcacaggcacatctgccaccctcggcaagggttcattgtctgatattcgtcatgtaacctctctgttcttgtcaattgtttctcatatcttttgaactcattttagttgaacctaaaagagtggctatgcagtttatgaagtagagctttttcttactggcagatttactcatcaaaaagggggggaaaattacagcatggtcagatgtatgtttataggttaagaattagcaagcaattgttactcaaatattttaaaatcttattatcattattgtcgttattgttactactaataatactactattactgccactatcactactactactaataccaccaccactacttcaccaccgctaccaccatcaacatggctgctccactgctgttattatttgatagtgtaattagaattcaactacttcaagtggaaagttgcgagctcgcatctttttctagaatatttgaaatttgtgggaattgttcccagtactccattagtgtatcagtgaggtatgttcttcctagctactctcatgaggcttcctttctctccttaactttagttccagcaatgatgagcgttaagtttttttttcatatttcatatttccaattaaattttcaatctgtgtgccattcttagtttcgggtagactaaggcttccagatgttatacgatcaaaagtaggtttaccctctgtcgataattctttgcatgatgtgctcgttcacaattcaacatcatgtcttaagaaggtattctcaatcatttttcccttagtcttgagtttctctgtaacttttgtgtttgtaggggattgtaactgccccaatattgtatgccatggaggaatttcctcaactgcgaacggtggtggaccggggattcgatgatcctgtcaatgtggagattgtaagcatttttctgctcatcttttcctagcattttctatgaccactgtattcattttttcctagcatgtccatgataacctctgtattcatattaaccttgtggttgaatgttcttgtacctcttaatttggcacgttttagtgcaattgatgataaaaatatgtgtatcctaattatagactgtagaggtcttttccttcaaatatgtcactattttctatcaagtctatagctttagttctgtattgagttgctccttttcatttgttttctattctaaattaagtattcccatcaagtcatcaacaagatgcagtggttgagtggaattggttattgcgagtttgtcttcaatgtggaatagtttgtgttacaaccttctgttcaaaagtctattccagctctcgggtttgtttcttgttagtaaccgcccattgttgtatactaattttggttcttgattttttgaaaatgttggaaagaatatccactgttaggttaatgctcggatcttctggattctcggttgactttttattactattttttttatgaagatcatgttataaatgtgtcgttgcgagcatctgcttacgttccttgtcctgatcagtgttggctttctcgtttaatgtcaaattctggttttcgtgaataatcaaccaaaatctaccatgaaaattgcaggctctggactaccttggtaagagccgagggatacagagaacaagagaacttgcaagaaaacatgctaaccttgcctcagcggctgttgactctcttcctgagagcgatgacgaggatgttcagagatcaagacgggcacttgtggaacttactcaaagagtcatcacaagaacaaaatag

SEQ ID NO: 140 - protein, 612 aa, Nicotiana sp.
MDVAISTNVWMLHMATSKIPPPPAATCLISSFSREKPSLVSKASCFSTAAAGRSMKTEPSPNQYSAISSSDQNLSRRSGNYQPTMWDFEYIQSIHNDYAGDKYMKHFNELKEEMKKIIMAEGLEELEKLELIDNLQRLGVSYHFRDEIMQILSSINQHSTSADSLYATALKFRLLREHVFHISQDIFNNFKDENDNLKQSICNDTKGLLQLYEASFLATETETTLNYATRFTTTHLKNYVDNHCGDEENLMVALVQHALELPRHWMMPRLETEWYLSIYERMSSSNPLLLELAKLDFNIVQAAHQKDLRILSRWWKSTYLAELSFSRDRVVEAFFWTVGLLFEPQYSYCRRMLTKVIVFIVVLDDIYDVFGSLDEMEILTDAVERWDIKAMEQLPDYMKICYLALFNSTNEMAYDILKEKGINVLPYFTRQWADLCKAYLQEARWYYKGYKPTLEEYIDNAWISIATPLILVHAFFFVTNPITKEALESLNKYPDIIRRCAIINRFLDDLGTSSEELKRGDVSKSIQCFMNEKGVSEEEAKEGIRILIKETWELMNKDQMEELLFSETFIGIALNFSRASHCMYQHGDGHGIQNSHIINRISKLLFEPITIL

SEQ ID NO: 141 - protein, 363 aa, Nicotiana sp.
MSLSTAITTWGNTHFALGNNGRSRFSSHGFLLPNLKIKFYTNNPSPLSISALLTTKQQTDESKNKKKQAMEFNEYVLEKANSVNKALESSVLIKDPVKIHESMRYSLLAGGKRIRPMLCIASCELVGGDESTAMPAACAVEMIHTMSLIHDDLPCMDNDDLRRGKPTNHKIYGEDVAVLAGDALLALAFEHIATQTKGVPSHRIVRVIGELAKCIGAERLVAGQVVDIISEGISDVDLKHLEFIHLHKTAALLEGSVVLGAILGGADAEEVEKLRKFARCIGLLFQVVDDILDVTKSSQQLGKTAGKDLVADKVTYPKLIGIDKSRDFAEELNKEAQAQLAGFDQEKAAPLIALANYIAYREN

SEQ ID NO: 142 - protein, 562 aa, Nicotiana sp.
MSHLKMSAAMDDSTFSSSSSTTNTERPLANFHSSVWGDYFLSYTPQLTEISSQEKVEFEELKEKARQMLVETPDNSTQKLELIDIIQRLGVAYHFENEIQTSIKNIFDASQQSKNEDDNLCVVALRFRLTRQQRHYMSSDVFKKFTNKDGKFKETLTKDVQGLLSLYEAAHLRVHGEEILEQGLNFTISHLKSMAPKLSNSLKSQISEALSQPVHINLPRFGAKTYMSLYENDESHNDLLLKFAKLDFNIVQKVYQSELYELTRYWWKDLDYANKFPYARDRLVECYYGAVGVLFEPQYSRTRKILGKLINIITMVDDTFDAYATFDEIVAFTDAMQRLDISAIDSVPVNLRPSYQVLVDFFNEIGQELAKEGKADRVYYAKFEMKKWIRAYFKEAQWLNAGYIPKCDEYLENGSVSVGITLIAVTSLVCLEELITKETLEWVINDPLILRTSGVISRLKDDIIGHVFEQKRGHVASFIECYMKEYGASKQEAYAAAEKEMANAWKDINTEFLRPSQVSMFGLEQIINPTRLVIGFQENDFINTQGEYKDKITSLLVDSVKI

SEQ ID NO: 143 - protein, 679 aa, Nicotiana sp.
MLNSMEDGRLNVLAYDTAWVSFIPNTTNNGNDQRPMFPSCLQWIIDNQLSDGSWGEEIVFCIYDRLLNTLVCVIALTLWNTCLHKRNKGVMFIKENLSKLETGEVENMTSGFELVFPTLLEKAQQLDIDIPYDAPVLKDIYARREVKLTRIPKDVIHTIPTTVLFSLEGLRDDLDWQRLLKLQMPDGSFLISPASTAFAFMETNDEKCLAYLQNVVEKSNGGARQYPFDLVTRLWAIDRLQRLGISYYFAEEFKELLNHVFRYWDEENGIFSGRNSNVSDVDDTCMAIRLLRLHGGEVDGSPTHMFNLYRCSQVLFPGEKILEEAKNFTYNFLQQCLANNRCLDKWVIAKDIPGEIRYALEFPWYASLPRVEARYYIEQYGGADDIWIGKTLYRMPDVNNNVYLQAAKLDYNRCQSQHRFEWLIMQEWFEKCNFQQFGISKKYLLVSYFLAAASIFEVEKSRERLAWAKSRIIYKMITSYYNDEATTWTTRNSLLMEFKVSHDPTRKNGNETKEILVLKNLRQFLRQLSEETFEDLGKDIHHQLQNAWETWLVFLREEKNACQEETELLVRTINLSGGYMTHDEILFDADYENLSNLTNKVCGKLNELQNDKVTGGSKNTNIELDMQALVKLVFGNTSSNINQDIKQTFFAVVKTFYYSAHVSEEIMNFHISKVLFQQV

SEQ ID NO: 144 - protein, 607 aa, Nicotiana sp.
MSSLCSNSATSLSCNNSFQSKNPLLHTIFNFFPSIKPHSCFPYTVIRCSIQKRPEYIPSKISDHKYVRIFDTTLRDGEQSPGATMTTKEKLDVARKLAKLGVDIIEAGFPASSEADFEAVRLIAEEIGNNSDGDYVPVICGLARCNKRDIDKAWEAVKCAKRPRVHTFIATSEIHMKYKLKMSKEEVVEKARSMVAYARSLGCEDVEFSPEDAGRSEREFLYHILGEVIKAGATTLNIPDTVGYTVPTEFGQLIADIKANTPGIENVIISTHCQNDLGLSTANTLAGACAGARQVEVTINGIGERAGNASLEEVVMALKCRGEQVLGGLYTGINSQHIVPTSKMVEEYTGLQVQPHKAIVGANAFAHESGIHQDGMLKHKDTYEIISPEDIGLNRANEAGIVLGKLSGRHALKSKMLELGYDIEGKELEDIFWRFKSVAEKKKKITDDDIIALMSDEIFQPQVVWQLADVQITCGSLGLSTATVKLIDSDGQDHVACSVGTGPVDAAYKAVDLIVKVPITLLEYSMNAVTEGIDAIASTRVLIRGEDDHAITNGSIGPTLHRTFSGTGADMDVVISSVRAYIGALNKMLSFGKLVSRYKKPEGSVVV

SEQ ID NO: 145 - protein, 607 aa, Nicotiana sp.
MDMAICTNVWMLHMATSKRPPSSTFLIFSFSRVKPKTSCLSTAAAGGMITEPSTNQYSAISSSDQNPTRRSGNYQPTMWDFEYIQSIRNNYAGEKYMKRFNKLKEEMKKLIMAEGSQELEKLELIDNLQKLGISYHFKHEIMQILRTINLNAATGDSLYATALKFKLLREHGFHISQDIFNDFKDENDNLKENICKDTIGLLQLYEASFLATETETTLKYATRFTAAHLKNYLGNHCDHKDNRMVALAQHALELPRHWMMPRLETQWYISIYEIMSNANPLLLELAKLDFNIVQAVHQQDLRILSRWWKSTCLAEKLSFSRDRLVENLFWAVGIEFEPHHSYFRRMLTKVIAFVGIIDDIYDVYGTLDELEVFTDAIERWEIKAIEQLPHYMKVCYLALFNITNEMAYEILKEQGIDVLPYLTKSWVDLCKSFIREARWYYSGYVPTLEEYMDNAWISIAVPMVLVHAFFLVTNPVPKEALESLSKYPDLIRCSATIFRLADDLATSSDELKRGDVPKSIQCYMNEKGTSEEEAREHIRFCIKETWERMNTTQRENSLFSDTFVEITKNIARTAHCMYLHGDGHGIQNGEVKNSISKILFEPITPLY

SEQ ID NO: 146 - protein, 509 aa, Nicotiana sp.
METQHFPFIFISLLIFLSFIFRFVLIRKNSRIVTKRLPPGPWSLPLIGNLHQLMNGRLPIHHTLRSLSQRYGPIFHLCLGEISIIVVSSPEMAKEIMKTQDLRFATRPEFMSGDIIFYNYTDIGTCPYGEYWRNMRKVCVLELLSAKMVKSFNSIRQEEMSSLISSINSTPDDSLINLSDKMFWFTSSVTCRSAFGKVIHDQDKLIMLVKDVTLLAGGFDLADLFPSRKWLHEISGLKSKMLKVHTKIDVILENIINEHRNNRKIGKKGNGESGGEDLIDVLLRVMESGELGTPITNKNIKGVIFDMFLAGAETSSTTIIWALAEMIRNPNVMAKAQLEVREVLKGKRTFEDSDIEELKYLKLVIKETLRLHPPIPLLLPRECREETKIEQYTIPIKTRVLVNAWAIGRDTRYWHDSESFIPERFENNSIDFKGNHFEFIPFGAGRRMCPGLLFGLVNVGHPLAQLLYHFDWKTLPGISSDSFDMTETDGVTAGRKDDLCLIATPFGLN

SEQ ID NO: 147 - protein, 791 aa, Nicotiana sp.
MILGYRSNIILPFSHHSLENGKLGSSTRNTISQRPCRGVRCSYSIASSLDGFEEAKERIKKTFQKVELSPSSYDTAWVAMIPSRNSVNQPCFPQCLDWILENQREDGSWGLSPSHSLLVKDSLSSTLACLLALSKWGVGDNQVQRGLIFIEKHGWAVDNKDQISPVGFRILFPSMIKYAEKMNLNLPLGPDIVNLAISNRDLAIERALQSDFKGNVSNLEYMAEGLGELCQWKELMVHQRENGSLFDSPATTAAALIYNQHDEKCFEYLNSILKLHKNWVPTIYPTKIHSLLCLVDTLQCVGVDRHFKTEIKDVLDEIYRLWQEKNEEIFSNVAHCALAFRLLRMSNYEVSPEELVEFVDEVHFFSTSGRFTSYFEILELHKASQLAIYGKDHILDKINNWTRSFMEQKLLTNDYIDRMSKNEAEFALRKFYATYGRVENQRYIEAYEMINFKILKAAYRSPNINSIDLLRFSKLDFNLCQAQHQQELQQLKRLDQVGLPQQNLYTNFFLTAALLFEPEFSDARLACVKSTMLLTLVDDFFDGFVGKDELLNIFELVESWDGNYSTVQFHSERVKVFFSALYKTIEELAAIANIKQGQCIKDHFINLWLDLLKNMMVEFEWWRNQTTPSIEEYLSVACETIGVRCITLITQCLLGPKLSKDVLQSSEMSALCNCTSMVARLLNDVGSYKREEAESSPTNIVSILINQSKGTISEEEAIKHAKEMLENKRRELLGMVLTQRKGSQLPQVCKDIFWKTCKSSYFAYSDGDEFRFPEEILKNRINELLFKPLKS

SEQ ID NO: 148 - protein, 495 aa, Nicotiana sp.
MSFFAVIPFFLFVFFIFRLYFPSSKTKKNLPPSPSKLPLIGHFHKLGLQPHRSLQKLSNEHGSMMMLQFGSVPVLIASSAEAASEIMKTQDLSFANKPISTIPSKLFFGPKDVAFTPYGDYWRNARSVCMLQLLNNKRVQSFRKIREEETSLLLQRIRESPNREVDLTELFVSMTNDIVCRVALGRKYCDGEEGRKFKSLLLEFVELLGVFNIGDYMPWLAWMNRFNGLNAKVDKVAKEFDAFLEGVIEEHRRKNKKSDTEAEGADFVDILLQVQKENKAGFQVEMDAIKAIIMDMFAAGTDTTSTLVEWTMNELLRNPKTLNKLRDEVRQVTQGKTEVTEDDLEKMPYLRAAVKESSRLHSPVPLLPREAIRDAKVLGYDIAAGTQVLVCPWAISRDPNLWENPEEFQPERFLDNSIDYKGLHFELIPFGAGRRGCPGITFAKFVNELALARLMFHFDFSLPNGAKPEDLDVDEAAGITVRRKFPLLAVATPRS

SEQ ID NO: 149 - protein, 261 aa, Nicotiana sp.
MQKLEGKVAIVTGGASGIGEAAARLFAHHGARVVIADIQDEKGRALAESIPLQRCSYVHCDVSDETQVKAMVDWTVQKYGQLDIMFSNAGVVGNSGQKVLDLDLSEFDRVLRVNARGMAACVKHAARAMVEKRVRGSIICTASIAASRAGPWRTDYVMSKHAVLGLMRSASRQLGEYGIRVNSVSPSAVMTPIMLSAEQETSMKVLKMYGNLTSLKGITLTVKHLADAVLFLASDDSAFVSGHDLVVDGGLLCLPSPNSSL

SEQ ID NO: 150 - protein, 546 aa, Nicotiana sp.
MDLRRSGNYKPSIWEDGYVQSRATFYAEEKHYERAAGLKEEVRRMLEKTIHPLELLELVDILQRLGLSYHFEEEIDRVLKQMYVNFCTTNRNDGQKSEDLYATALEFRLLRQEGYHVPQEMFYAFMDKEGKFKTSLVVDTNGLLSLYEACYLCMEGESILEIARDFTTHFLTESLNKKTDKNLAEQVSHALEMPLHWRMQRLEARWFIEEVYHKRENMNPLILELAKLDYNMVQATYLEELKQMSRWDKNIKLVKKMSFVRDRLVEGFLWAVGFTPNPQFGYCRKFSTKLSVFLTTIDDIYDVYGTMDELELFTDIVDRWDINAIERLPDYMKICFLALFNSMNELAYDILKEQGFSIISHIRKQWANLCKAYLLEVKWYQSRYTPSLNEFLRNAWITNTGPVLIMHAYFCITNPIKEEELECLKNYPAIIQSPSLILRLANDLATSPDEIKKGDYLKSIHCYMHESGRSEENARNYIKQLIDQTWKKMNKDILRDSSFSKDFRTTAMNLARIAQCMYQHGDGFGIPDRETKDRIRSLFFEPIPLS

SEQ ID NO: 151 - protein, 461 aa, Nicotiana sp.
MLHMIGGEPHHVLRDLAKKYGPLMHLQLGEISAVVVTSREMAKEVLKTHDMVFASRPKIVAMDIICYNQSDIAFSPYGDQWRQMRKICVMELLNAKNVRSFSSIRRDEVVRLIDSIRSDSSSGELVNFTQRIIWFASSMTCRSAFGQVLKGQDIFAKKIREVIGLAEGFDVVDIFPSYKFLHVLSGMKRKLLNAHLKVDAIVEDVINEHKKNLAAGKSNGALGGEDLIDVLLRLKNDTSLQFPITNNNIKAVIVDMFAAGTETSSTTTVWAMAEMMKNPSVFTKAQAEVREAFRDKVSFDENDVEELKYLKLVIKETLRLHPPSPLLVPRECREDTDINGYTIPAKTKVMVNVWALGRDPKYWDDAESFKPERFEQCSMDFFGNNFEFLPFGGGRRICPGMSFGLANLYLPLAQLLYHFDWKLPTGIKPRDLDLTELSGITIARKGDLYLNATPYQPSRLI

SEQ ID NO: 152 - protein, 606 aa, Nicotiana sp.
MASITANHTFSRNPNISLHPQNPLIQTQALFNFKSSIPKCSPIICCAIRRRPDYTPSHIPDPKYIRIFDTTLRDGEQSPGATMTTKEKLDVARQLAKLGVDIIEAGFPASSEADLEAVKLIAKEVGNGVYEEGHVPVICGLARCNKRDIDKAWEAVKYAKKPRIHTFIATSEIHMKFKLKMSRDEVVEKARSMVAYARSIGCEDVEFSPEDAGRSDPEFLYHILGEVIKAGATTLNIPDTVGYTVPSEFGKLIADIKANTPGIGDVIISTHCQNDLGLSTANTLAGACAGARQVEVTINGIGERAGNASLEEVVMALKCRGEQVLGGLYTGINTQHILMSSKMVEEYTGLHVQPHKAIVGANAFAHESGIHQDGMLKHKDTYEIISPEDIGLNRANESGIVLGKLSGRHALQAKMLELGYDIEGKELEDLFWRFKSVAEKKKKITDDDLIALMSDEVFQPQFVWQLENVQVTCGSLGLSTATVKLIDADGQEHVSCSVGTGPVDAAYKAVDLIVKVPVALLEYSLNAVTEGIDAIASTRVLIRGENGHTSTHALTGETVHRSFSGTGADMDIVISSVRAYIGALNKMLSFRKLVSKHSRPEGSAVV

SEQ ID NO: 153 - protein, 415 aa, Nicotiana sp.
MLFARGLSQISRRSINRYQWLCPQQQQFHHSNHFPSPIDASHKVLGCRVIHSWVSNALSGIGQQIHHQSTAVAEEQVDPFSLVADELSLLTNRLRSMVVAEVPKLASAAEYFFKMGVEGKRFRPTVLLLMATALNAPVLRPQVDVDSLSRDLRTRQQCIAEITEMIHVASLLHDDVLDDADTRRGIGSLNFVMGNKLAVLAGDFLLSRACVALASLKNTEVVSLLATVVEHLVTGETMQMTTSSDERCSMDYYMQKTYYKTASLISNSCKAIALLAGHTAEVSMLAFDYGKNLGLAFQLIDDVLDFTGTSATLGKGSLSDIRHGIVTAPILYAMEEFPQLRTVVDRGFDDPVNVEIALDYLGKSRGIQRTRELARKHANLASAAVDSLPESDDEDVQRSRRALVELTQRVITRTK

SEQ ID NO: 154 - DNA, 12723 bp, Artificial Sequence
  Description of Artificial Sequence: Synthetic polynucleotide
tttcacgcccttttaaatatccgattattctaataaacgctcttttctcttaggtttacccgccaatatatcctgtcaaacactgatagtttaaactgaaggcgggaaacgacaatctgatccaagctcaagctgctctagcattcgccattcaggctgcgcaactgttgggaagggcgatcggtgcgggcctcttcgctattacgccagctggcgaaagggggatgtgctgcaaggcgattaagttgggtaacgccagggttttcccagtcacgacgttgtaaaacgacggccagtgccaagcttgcatgcctgcaggtccccagattagccttttcaatttcagaaagaatgctaacccacagatggttagagaggcttacgcagcaggtctcatcaagacgatctacccgagcaataatctccaggaaatcaaataccttcccaagaaggttaaagatgcagtcaaaagattcaggactaactgcatcaagaacacagagaaagatatatttctcaagatcagaagtactattccagtatggacgattcaaggcttgcttcacaaaccaaggcaagtaatagagattggagtctctaaaaaggtagttcccactgaatcaaaggccatggagtcaaagattcaaatagaggacctaacagaactcgccgtaaagactggcgaacagttcatacagagtctcttacgactcaatgacaagaagaaaatcttcgtcaacatggtggagcacgacacacttgtctactccaaaaatatcaaagatacagtctcagaagaccaaagggcaattgagacttttcaacaaagggtaatatccggaaacctcctcggattccattgcccagctatctgtcactttattgtgaagatagtggaaaaggaaggtggctcctacaaatgccatcattgcgataaaggaaaggccatcgttgaagatgcctctgccgacagtggtcccaaagatggacccccacccacgaggagcatcgtggaaaaagaagacgttccaaccacgtcttcaaagcaagtggattgatgtgatatctccactgacgtaagggatgacgcacaatcccactatccttcgcaagacccttcctctatataaggaagttcatttcatttggagagaacacgggggactctagagttatcaacaagtttgtacaaaaaagctgaacgagaaacgtaaaatgatataaatatcaatatattaaattagattttgcataaaaaacagactacataatactgtaaaacacaacatatccagtcactatggcggcccctcgaggggccgcattaggcaccccaggctttacactttatgcttccggctcgtataatgtgtggattttgagttaggatccggcgagattttcaggagctaaggaagctaaaatggagaaaaaaatcactggatataccaccgttgatatatcccaatggcatcgtaaagaacattttgaggcatttcagtcagttgctcaatgtacctataaccagaccgttcagctggatattacggcctttttaaagaccgtaaagaaaaataagcacaagttttatccggcctttattcacattcttgcccgcctgatgaatgctcatccggaattccgtatggcaatgaaagacggtgagctggtgatatgggatagtgttcacccttgttacaccgttttccatgagcaaactgaaacgttttcatcgctctggagtgaataccacgacgatttccggcagtttctacacatatattcgcaagatgtggcgtgttacggtgaaaacctggcctatttccctaaagggtttattgagaatatgtttttcgtctcagccaatccctgggtgagtttcaccagttttgatttaaacgtggccaatatggacaacttcttcgcccccgttttcaccatgggcaaatattatacgcaaggcgacaaggtgctgatgccgctggcgattcaggttcatcatgccgtctgtgatggcttccatgtcggcagaatgcttaatgaattacaacagtactgcgatgagtggcagggcggggcgtaaagatctggatccggcttactaaaagccagataacagtatgcgtatttgcgcgctgatttttgcggtataagaatatatactgatatgtatacccgaagtatgtcaaaaagaggtgtgctatgaagcagcgtattacagtgacagttgacagcgacagctatcagttgctcaaggcatatatgatgtcaatatctccggtctggtaagcacaaccatgcagaatgaagcccgtcgtctgcgtgccgaacgctggaaagcggaaaatcaggaagggatggctgaggtcgcccggtttattgaaatgaacggctcttttgctgacgagaacagggactggtgaaatgcagtttaaggtttacacctataaaagagagagccgttatcgtctgtttgtggatgtacagagtgatattattgacacgcccgggcgacggatggtgatccccctggccagtgcacgtctgctgtcagataaagtctcccgtgaactttacccggtggtgcatatcggggatgaaagctggcgcatgatgaccaccgatatggccagtgtgccggtctccgttatcggggaagaagtggctgatctcagccaccgcgaaaatgacatcaaaaacgccattaacctgatgttctggggaatataaatgtcaggctcccttatacacagccagtctgcaggtcgaccatagtgactggatatgttgtgttttacagtattatgtagtctgttttttatgcaaaatctaatttaatatattgatatttatatcattttacgtttctcgttcagctttcttgtacaaagtggttgataacagcatgagtaaaggagaagaacttttcactggagttgtcccaattcttgttgaattagatggtgatgttaatgggcacaaattttctgtcagtggagagggtgaaggtgatgcaacatacggaaaacttacccttaaatttatttgcactactggaaaactacctgttccatggccaacacttgttactactttcgcttacggtgtgcagtgcttctcaagatacccagatcatatgaagcggcacgacttcttcaagagcgccatgcctgagggatacgtgcaggagaggaccatcttcttcaaggacgacgggaactacaagacacgtgctgaagtcaagtttgagggagacaccctcgtcaacaggatcgagcttaagggaatcgatttcaaggaggacggaaacatcctcggccacaagttggaatacaacttcaactcccacaacgtgtacatcatggcagacaaacaaaagaatggaatcaaagttaacttcaaaattagacacaacattgaagatggaagcgttcaactagcagaccattatcaacaaaatactccaattggcgatggccctgtccttttaccagacaaccattacctgtccacacaatctgccctttcgaaagatcccaacgaaaagagagaccacatggtccttcttgagtttgtaacagctgctgggattacacatggcatggatgaactatacaaataagcttagagctcgaatttccccgatcgttcaaacatttggcaataaagtttcttaagattgaatcctgttgccggtcttgcgatgattatcatataatttctgttgaattacgttaagcatgtaataattaacatgtaatgcatgacgttatttatgagatgggtttttatgattagagtcccgcaattatacatttaatacgcgatagaaaacaaaatatagcgcgcaaactaggataaattatcgcgcgcggtgtcatctatgttactagatcgggaattggttccggaaccaattcgtaatcatggtcatagctgtttcctgtgtgaaattgttatccgctcacaattccacacaacatacgagccggaagcataaagtgtaaagcctggggtgcctaatgagtgagctaactcacattaggctgaattaggcgcgcctatttctattaattcccgatctagtaacatagatgacaccgcgcgcgataatttatcctagtttgcgcgctatattttgttttctatcgcgtattaaatgtataattgcgggactctaatcataaaaacccatctcataaataacgtcatgcattacatgttaattattacatgcttaacgtaattcaacagaaattatatgataatcatcgcaagaccggcaacaggattcaatcttaagaaactttattgccaaatgtttgaacgatcggggaaattcgggggatcgatcccgcgaactgtggacgagaactgtgccaccaagcgtaaggccgttctctcgcatttgccttgctaggctcgcgcgagttgctggctgaggcgttctcgaaatcagctcttgttcggtcggcatctactctattcctttgccctcggacgagtgctggggcgtcggtttccactatcggcgagtacttctacacagccatcggtccagacggccgcgcttctgcgggcgatttgtgtacgcccgacagtcccggctccggatcggacgattgcgtcgcatcgaccctgcgcccaagctgcatcatcgaaattgccgtcaaccaagctctgatagagttggtcaagaccaatgcggagcatatacgcccggagccgcggcgatcctgcaagctccggatgcctccgctcgaagtagcgcgtctgctgctccatacaagccaaccacggcctccagaagaagatgttggcgacctcgtattgggaatccccgaacatcgcctcgctccagtcaatgaccgctgttatgcggccattgtccgtcaggacattgttggagccgaaatccgcgtgcacgaggtgccggacttcggggcagtcctcggcccaaagcatcagctcatcgagagcctgcgcgacggacgcactgacggtgtcgtccatcacagtttgccagtgatacacatggggatcagcaatcgcgcatatgaaatcacgccatgtagtgtattgaccgattccttgcggtccgaatgggccgaacccgctcgtctggctaagatcggccgcagcgatcgcatccatggcctccgcgaccggctgcagaacagcgggcagttcggtttcaggcaggtcttgcaacgtgacaccctgtgcacggcgggagatgcaataggtcaggctctcgctgaatgccccaatgtcaagcacttccggaatcgggagcgcggccgatgcaaagtgccgataaacataacgatctttgtagaaaccatcggcgcagctatttacccgcaggacatatccacgccctcctacatcgaagctgaaagcacgagattcttcgccctccgagagctgcatcaggtcggagacgctgtcgaacttttcgatcagaaacttctcgacagacgtcgcggtgagttcaggctttttcatatcttattgccccccgggatcagatctggattgagagtgaatatgagactctaattggataccgaggggaatttatggaacgtcagtggagcatttttgacaagaaatatttgctagctgatagtgaccttaggcgacttttgaacgcgcaataatggtttctgacgtatgtgcttagctcattaaactccagaaacccgcggctgagtggctccttcaacgttgcggttctgtcagttccaaacgtaaaacggcttgtcccgcgtcatcggcgggggtcataacgtgactcccttaattctccgctcatgatcttgatcccctgcgccatcagatccttggcggcaagaaagccatccagtttactttgcagggcttcccaaccttaccagagggcgccccagctggcaattccggttcgcttgctgtccataaaaccgcccagtctagctatcgccatgtaagcccactgcaagctacctgctttctctttgcgcttgcgttttcccttgtccagatagcccagtagctgacattcatccggggtcagcaccgtttctgcggactggctttctacgtgttccgcttcctttagcagcccttgcgccctgagtgcttgcggcagcgtgaagctgatccgtcgagattaatagaaataaattcagcctaattcggcgttaattcagtacattaaaaacgtccgcaatgtgttattaagttgtctaagcgtcaatttgtttacaccacaatatatcctgccaccagccagccaacagctccccgaccggcagctcggcacaaaatcaccactcgatacaggcagcccatcagtccgggacggcgtcagcgggagagccgttgtaaggcggcagactttgctcatgttaccgatgctattcggaagaacggcaactaagctgccgggtttgaaacacggatgatctcgcggagggtagcatgttgattgtaacgatgacagagcgttgctgcctgtgatcaattcgggcacgaacccagtggacataagcctgttcggttcgtaagctgtaatgcaagtagcgtatgcgctcacgcaactggtccagaaccttgaccgaacgcagcggtggtaacggcgcagtggcggttttcatggcttgttatgactgtttttttggggtacagtctatgcctcgggcatccaagcagcaagcgcgttacgccgtgggtcgatgtttgatgttatggagcagcaacgatgttacgcagcagggcagtcgccctaaaacaaagttaaacatcatgggggaagcggtgatcgccgaagtatcgactcaactatcagaggtagttggcgtcatcgagcgccatctcgaaccgacgttgctggccgtacatttgtacggctccgcagtggatggcggcctgaagccacacagtgatattgatttgctggttacggtgaccgtaaggcttgatgaaacaacgcggcgagctttgatcaacgaccttttggaaacttcggcttcccctggagagagcgagattctccgcgctgtagaagtcaccattgttgtgcacgacgacatcattccgtggcgttatccagctaagcgcgaactgcaatttggagaatggcagcgcaatgacattcttgcaggtatcttcgagccagccacgatcgacattgatctggctatcttgctgacaaaagcaagagaacatagcgttgccttggtaggtccagcggcggaggaactctttgatccggttcctgaacaggatctatttgaggcgctaaatgaaaccttaacgctatggaactcgccgcccgactgggctggcgatgagcgaaatgtagtgcttacgttgtcccgcatttggtacagcgcagtaaccggcaaaatcgcgccgaaggatgtcgctgccgactgggcaatggagcgcctgccggcccagtatcagcccgtcatacttgaagctagacaggcttatcttggacaagaagaagatcgcttggcctcgcgcgcagatcagttggaagaatttgtccactacgtgaaaggcgagatcaccaaggtagtcggcaaataatgtctagctagaaattcgttcaagccgacgccgcttcgcggcgcggcttaactcaagcgttagatgcactaagcacataattgctcacagccaaactatcaggtcaagtctgcttttattatttttaagcgtgcataataagccctacacaaattgggagatatatcatgcatgaccaaaatcccttaacgtgagttttcgttccactgagcgtcagaccccgtagaaaagatcaaaggatcttcttgagatcctttttttctgcgcgtaatctgctgcttgcaaacaaaaaaaccaccgctaccagcggtggtttgtttgccggatcaagagctaccaactctttttccgaaggtaactggcttcagcagagcgcagataccaaatactgtccttctagtgtagccgtagttaggccaccacttcaagaactctgtagcaccgcctacatacctcgctctgctaatcctgttaccagtggctgctgccagtggcgataagtcgtgtcttaccgggttggactcaagacgatagttaccggataaggcgcagcggtcgggctgaacggggggttcgtgcacacagcccagcttggagcgaacgacctacaccgaactgagatacctacagcgtgagctatgagaaagcgccacgcttcccgaagggagaaaggcggacaggtatccggtaagcggcagggtcggaacaggagagcgcacgagggagcttccagggggaaacgcctggtatctttatagtcctgtcgggtttcgccacctctgacttgagcgtcgatttttgtgatgctcgtcaggggggcggagcctatggaaaaacgccagcaacgcggcctttttacggttcctggccttttgctggccttttgctcacatgttctttcctgcgttatcccctgattctgtggataaccgtattaccgcctttgagtgagctgataccgctcgccgcagccgaacgaccgagcgcagcgagtcagtgagcgaggaagcggaagagcgcctgatgcggtattttctccttacgcatctgtgcggtatttcacaccgcatatggtgcactctcagtacaatctgctctgatgccgcatagttaagccagtatacactccgctatcgctacgtgactgggtcatggctgcgccccgacacccgccaacacccgctgacgcgccctgacgggcttgtctgctcccggcatccgcttacagacaagctgtgaccgtctccgggagctgcatgtgtcagaggttttcaccgtcatcaccgaaacgcgcgaggcagggtgccttgatgtgggcgccggcggtcgagtggcgacggcgcggcttgtccgcgccctggtagattgcctggccgtaggccagccatttttgagcggccagcggccgcgataggccgacgcgaagcggcggggcgtagggagcgcagcgaccgaagggtaggcgctttttgcagctcttcggctgtgcgctggccagacagttatgcacaggccaggcgggttttaagagttttaataagttttaaagagttttaggcggaaaaatcgccttttttctcttttatatcagtcacttacatgtgtgaccggttcccaatgtacggctttgggttcccaatgtacgggttccggttcccaatgtacggctttgggttcccaatgtacgtgctatccacaggaaagagaccttttcgacctttttcccctgctagggcaatttgccctagcatctgctccgtacattaggaaccggcggatgcttcgccctcgatcaggttgcggtagcgcatgactaggatcgggccagcctgccccgcctcctccttcaaatcgtactccggcaggtcatttgacccgatcagcttgcgcacggtgaaacagaacttcttgaactctccggcgctgccactgcgttcgtagatcgtcttgaacaaccatctggcttctgccttgcctgcggcgcggcgtgccaggcggtagagaaaacggccgatgccgggatcgatcaaaaagtaatcggggtgaaccgtcagcacgtccgggttcttgccttctgtgatctcgcggtacatccaatcagctagctcgatctcgatgtactccggccgcccggtttcgctctttacgatcttgtagcggctaatcaaggcttcaccctcggataccgtcaccaggcggccgttcttggccttcttcgtacgctgcatggcaacgtgcgtggtgtttaaccgaatgcaggtttctaccaggtcgtctttctgctttccgccatcggctcgccggcagaacttgagtacgtccgcaacgtgtggacggaacacgcggccgggcttgtctcccttcccttcccggtatcggttcatggattcggttagatgggaaaccgccatcagtaccaggtcgtaatcccacacactggccatgccggccggccctgcggaaacctctacgtgcccgtctggaagctcgtagcggatcacctcgccagctcgtcggtcacgcttcgacagacggaaaacggccacgtccatgatgctgcgactatcgcgggtgcccacgtcatagagcatcggaacgaaaaaatctggttgctcgtcgcccttgggcggcttcctaatcgacggcgcaccggctgccggcggttgccgggattctttgcggattcgatcagcggccgcttgccacgattcaccggggcgtgcttctgcctcgatgcgttgccgctgggcggcctgcgcggccttcaacttctccaccaggtcatcacccagcgccgcgccgatttgtaccgggccggatggtttgcgaccgctcacgccgattcctcgggcttgggggttccagtgccattgcagggccggcagacaacccagccgcttacgcctggccaaccgcccgttcctccacacatggggcattccacggcgtcggtgcctggttgttcttgattttccatgccgcctcctttagccgctaaaattcatctactcatttattcatttgctcatttactctggtagctgcgcgatgtattcagatagcagctcggtaatggtcttgccttggcgtaccgcgtacatcttcagcttggtgtgatcctccgccggcaactgaaagttgacccgcttcatggctggcgtgtctgccaggctggccaacgttgcagccttgctgctgcgtgcgctcggacggccggcacttagcgtgtttgtgcttttgctcattttctctttacctcattaactcaaatgagttttgatttaatttcagcggccagcgcctggacctcgcgggcagcgtcgccctcgggttctgattcaagaacggttgtgccggcggcggcagtgcctgggtagctcacgcgctgcgtgatacgggactcaagaatgggcagctcgtacccggccagcgcctcggcaacctcaccgccgatgcgcgtgcctttgatcgcccgcgacacgacaaaggccgcttgtagccttccatccgtgacctcaatgcgctgcttaaccagctccaccaggtcggcggtggcccatatgtcgtaagggcttggctgcaccggaatcagcacgaagtcggctgccttgatcgcggacacagccaagtccgccgcctggggcgctccgtcgatcactacgaagtcgcgccggccgatggccttcacgtcgcggtcaatcgtcgggcggtcgatgccgacaacggttagcggttgatcttcccgcacggccgcccaatcgcgggcactgccctggggatcggaatcgactaacagaacatcggccccggcgagttgcagggcgcgggctagatgggttgcgatggtcgtcttgcctgacccgcctttctggttaagtacagcgataaccttcatgcgttccccttgcgtatttgtttatttactcatcgcatcatatacgcagcgaccgcatgacgcaagctgttttactcaaatacacatcacctttttagacggcggcgctcggtttcttcagcggccaagctggccggccaggccgccagcttggcatcagacaaaccggccaggatttcatgcagccgcacggttgagacgtgcgcgggcggctcgaacacgtacccggccgcgatcatctccgcctcgatctcttcggtaatgaaaaacggttcgtcctggccgtcctggtgcggtttcatgcttgttcctcttggcgttcattctcggcggccgccagggcgtcggcctcggtcaatgcgtcctcacggaaggcaccgcgccgcctggcctcggtgggcgtcacttcctcgctgcgctcaagtgcgcggtacagggtcgagcgatgcacgccaagcagtgcagccgcctctttcacggtgcggccttcctggtcgatcagctcgcgggcgtgcgcgatctgtgccggggtgagggtagggcgggggccaaacttcacgcctcgggccttggcggcctcgcgcccgctccgggtgcggtcgatgattagggaacgctcgaactcggcaatgccggcgaacacggtcaacaccatgcggccggccggcgtggtggtgtcggcccacggctctgccaggctacgcaggcccgcgccggcctcctggatgcgctcggcaatgtccagtaggtcgcgggtgctgcgggccaggcggtctagcctggtcactgtcacaacgtcgccagggcgtaggtggtcaagcatcctggccagctccgggcggtcgcgcctggtgccggtgatcttctcggaaaacagcttggtgcagccggccgcgtgcagttcggcccgttggttggtcaagtcctggtcgtcggtgctgacgcgggcatagcccagcaggccagcggcggcgctcttgttcatggcgtaatgtctccggttctagtcgcaagtattctactttatgcgactaaaacacgcgacaagaaaacgccaggaaaagggcagggcggcagcctgtcgcgtaacttaggacttgtgcgacatgtcgttttcagaagacggctgcactgaacgtcagaagccgactgcactatagcagcggaggggttggatcaaagtactttgatcccgaggggaaccctgtggttggcatgcacatacaaatggacgaacggataaacct

SEQ ID NO: 155 - DNA, 453 bp, Nicotiana sp.
atggcttcagcaaaaattttcttgattttccttttggctgcattaatcgcaacccccgctgcatttgccatacttgttccaacacttgtttcaacacatataagtgggcttgtattttgcagcgttaacggcaatttagatgtcatcaacggactcagcccccaagtttttcctaatgcatcagtgcaattgcggtgtggagcaacaaatgtgatatcaagtacaataacaaatggatcgggagcattttccttggcggtgaatactttcccactgctaaactgcaatttagtggttgcaactccactatcaacatgtaacgcgaccttacaatcggttgggcgtttggcgtcatccttgagacttgtaaatatcactcttggcagtggcaccggtcttattagagtcggtttagctcctactggttttatacttaatcttaacatcaattaa

SEQ ID NO: 156 - DNA, 453 bp, Nicotiana sp.; identical to SEQ ID NO: 155

SEQ ID NO: 157 - protein, 150 aa, Nicotiana sp.
MASAKIFLIFLLAALIATPAAFAILVPTLVSTHISGLVFCSVNGNLDVINGLSPQVFPNASVQLRCGATNVISSTITNGSGAFSLAVNTFPLLNCNLVVATPLSTCNATLQSVGRLASSLRLVNITLGSGTGLIRVGLAPTGFILNLNIN

SEQ ID NO: 158 - DNA, 1500 bp, Nicotiana sp.
atgcagttcttcaacttcttttcccttttcctttttgtgtcattcctctttttatttaagaaatggaagaattccaatagccaaaccaaaagattgcctccaggtccatggaaattacctattcttggaagcatgcttcatatgctaggtggacttccacatcatgtccttagagatttagccaaaaaatatggaccaattatgcaccttcaactaggcgaagtttctctggttgttattagttctcctgggatggcaaaagaagtactaaaaactcatgacctcgcttttgcaaataggcctttacttgtagctgccaagattttttcttataattgcatggacattgccttttctccttatggcaattactggagacaaatgcgtaaaatttgtctcttggaattgctcagtgccaaaaatgtcaagtcattcaactcaattagacaagatgaagttcatcgtatgattaaattttttcgatcatctcctggtaagccagttaatgttacaaaaaggatttcacttttcacaaactctatgacatgtagatcagcatttggacaagaatataaggagcaagacgaatttgtacaactagtcaaaaaagtgtcaaacttaatagaagggtttgatgtggctgatatattcccttcactgaagtttcttcatgtgctcactggaatgaaggctaaagttatgaatacacacaatgaattagatgccattcttgaaaatatcatcaatgagcacaagaagacttcaaaaagcgatggtgaatcaggaggtgaaggtataattggtgtactgctaagacttatgaaagagggaggccttcaatttccaatcactaacgacaacatcaaagctatcatttctgacatctttggtgggggaacagaaacttcatcaacaacaattaattgggccatggtcgaaatgatgaagaatccaagtgtattttccaaagctcaagcagaggtaagagaaatcttgagagggaaagaaacttttggtgaaattgatgtcgaggagttcaaatacctaaagatggtcattaaagaaactttcagactccatcctccagtacctcttttgcttccaagagaatgtagagaagaaacggacttaaacggctacactattccattgaaaacaaaagtcgtggttaatgtttgggcaatgggaagagatccaaaatattgggatgacgtagaaagctttaaacctgagagatttgaacacaactctatggattatattggtaataattatgaatatcttccctttggtagtggaaggagaatttgccccggaatatcatttggtttagcaaatgtttattttccactggctcaattattgtatcactttgactggaaactcccaactgaaatcaatccaagtgaattggacttgactgaggcggctggagcagcttgtgccagaaagaatgacctacacttgatcgcaactgcttatcaacactgtgaagagtga

SEQ ID NO: 159 - DNA, 1500 bp, Nicotiana sp.; identical to SEQ ID NO: 158

SEQ ID NO: 160 - protein, 499 aa, Nicotiana sp.
MQFFNFFSLFLFVSFLFLFKKWKNSNSQTKRLPPGPWKLPILGSMLHMLGGLPHHVLRDLAKKYGPIMHLQLGEVSLVVISSPGMAKEVLKTHDLAFANRPLLVAAKIFSYNCMDIAFSPYGNYWRQMRKICLLELLSAKNVKSFNSIRQDEVHRMIKFFRSSPGKPVNVTKRISLFTNSMTCRSAFGQEYKEQDEFVQLVKKVSNLIEGFDVADIFPSLKFLHVLTGMKAKVMNTHNELDAILENIINEHKKTSKSDGESGGEGIIGVLLRLMKEGGLQFPITNDNIKAIISDIFGGGTETSSTTINWAMVEMMKNPSVFSKAQAEVREILRGKETFGEIDVEEFKYLKMVIKETFRLHPPVPLLLPRECREETDLNGYTIPLKTKVVVNVWAMGRDPKYWDDVESFKPERFEHNSMDYIGNNYEYLPFGSGRRICPGISFGLANVYFPLAQLLYHFDWKLPTEINPSELDLTEAAGAACARKNDLHLIATAYQHCEE

SEQ ID NO: 161 - DNA, 1113 bp, Cannabis sativa
atgagcactgtaaatctcacatgggttcaaacctgttccatgttcaaccaaggaggtagatccagatccttatcaactttcaatctcaatctctaccaccctttgaaaaaaacacccttttcaatccaaaccccaaaacaaaaacgacccacttcaccattttcatcaatctcagctgttctaaccgagcaagaagccgttaaagaaggcgatgaagaaaaatccatcttcaatttcaagtcttacatggtccaaaaagccaactcagtcaaccaagctttagactcagccgttttgctcagagatcccattatgatacacgagtccatgcgttactcactcctcgccggaggaaaacgagtcagacccatgctctgtctctcagcctgtgaactcgtaggcggaaaagaatccgtagccatgccggctgcctgcgccgtcgaaatgatccacaccatgtctctaatccacgacgacctcccttgtatggacaacgatgacctccgccgtggaaagcccacaaaccacaaagtcttcggagaagacgtggccgttttagccggcgatgcacttttagcctttgcttttgagcacatggcggtctctaccgttggtgttccggcagccaagattgtcagggcgattggtgagcttgctaagtcaattgggtcagaaggattagtggctggtcaagtggttgatattgattcagagggtttggctaatgttgggcttgaacaacttgagttcattcatctccataagactggggctcttctagaagcttctgttgttttgggggctattcttggtggtggtacagatgaagaagttgaaaaacttaggagctttgctaggtgtattggcttgctttttcaggttgttgatgacattcttgatgtgactaaatcttctcaagaattgggtaaaactgctgggaaagatttggtggctgataaggttacttatccaaggctaatgggtattgacaaatcaagagaatttgctgagcaattgaacacagaagccaaacagcatctttctggttttgatcccataaaggctgctcctttaattgctttggctaattatattgcttataggcaaaattga

SEQ ID NO: 162 - DNA, 11826 bp, Cannabis sativa
atgccttctctcttctcccaatcactacttctccctttctctcaaaacactaatactctctcccttttccatcaaccaaaacttcttcctccaggtattattttatcactaattcacacatatatatatacatatatgtacaccactatacattattttatttaattttctgtattctttctcaaaatcattctatctgtccagtccgttttctttaggctgtgaatttagtaatatttctgttgggtttttcaacttattggatctttatcaactaattctcagtgaatgtctgtcttttgatttttcagaagaaatttattagcaaaacagtgaacaagctcactctgttttctttgtctgcttccagaacttttggttaaatcagcagttagaaagttttatctataataattttctttttacaattatatattatatatatatatatgatgagctactcttccctgggttttctgaactaattgaattaataaatcgtaatttaattgcagttgcttcagctgtgcagactcgtgtaatttaaattattttagttatgtattatatacgtatccctcttttatctcttaattttagtcctaatttttgtcctatatatgtttatagaaaacagctatcatatacatatataaatatagcttcgttctttatgtgttttttttcaaatatatttggttttccttcccaagaatgatctgaaacaagcttttgtgatccttacaagagttttacttgaatacggtaaagtattcaatggcagcatatatatatatatgtgtgtgtgtatttcactgtcaagaagcaaagcgacatttttgtattattgtgccatgttgtacctcagatcaaagattcttctttttttatctttttttttttccttaaaatttacatcgttttcaataacagaggaaataagctattaaaatattgatatattaaaatatacagttatatatatatatatatattattaaacaatatatgttatatccctttatgtatatttctatatgtataggtgcttcgctattggaagctaaagacaaacaagttaactttgatcgtgatattcgctcaaaatgcagcgctatatcaaaaccccgcactcacggtaaagctaaatgtttaatcttaaaaagatttagagagagagagaaagagaatttagaaatcgaattgttttttttacttgtgagagatgatatggaattctctgctaaaataaaacaaacacatttactttcctttaaaatcaatatacttatataaagcaaattcgtctcattcgtatgtatatcccaaatatgcagacgtgtttcaaagtggtggtctgccagttataaagtggcacgagattgtggaggatgacatagatggagaagaagaagatactaaggtgggtttatgtacaaattaacttttcttactttttgcttttgcctttcctattttattttctttttataattggttcgcgcatatatatatagcaaagaaacaactactacttcactttctctctctatatgtatatataatatttacaaatatcctatgtttattctgatgtgattattaatgtagaagaaattctcttcttttttttttttttaatttccaatttaaagtaatttatttgtttttttttttcaaataaaaaagtggacaagatcgaatgagatcgaggaacgtgtcgcttcaatcaaatcaatgttggagagtatggatgagggagagataagcatttcagcgtacgacacagcatgggtagcccttgtggaagatattcatgggagtggcttacctcaattcccatcgagtctccaatggatcgccacacatcagctctccgacggttcttggggcgatgctgacattttctccgcacacgatcgcctcatcaacactttggcttgtgttgttgctttgaaatcttggaacctttatcccgaaaaatgtcaaaaaggtatgtataaattaattaatttaatcgttttaattttcgttttgataatgaccgggtggaattattataacaggtatggcctttttcaatgcaaatataagtaagcttgagagggagaatccggaacacatgcctattggtttcgaagtggctttcccttctttacttgaaatagctcgaaaattaaaccttgaagtgcctgaggattctcctgtgttaaaagtcatatatgctaggagagatttcaagctcacaaggtaatattatataagagtaaagagtctcataatgtatatatctagctagatgagagagaaagagtgagtatataacaacacaatgcaaaagtaatgactttatagttttagtatatacatatataattagtacgtgcgcgcgtgtggataggattccgagggacataatgcacacagtgcccacgacgctactccatagcttggaaggaatggtaggtctggactgggaaaagcttttgaaactgcagtcccaagatgggtcattcttgttctcaccatcctcaactgcttttgcactcatggagaccaaagaccgaaattgcttgcaatatttaactaaagcggtccaaaggttcaacgggggtggtacgtaaatattacctacctacctttattatcttttcttttttcctattggtttttcttctgtttttgtttgttcttttgttttgtttttacttttccaatgtggttctatcatctatgtactgtctcttgttatgattgtcctcatcagtcccaaatgtttacccggttgacttgttcgagcacctttgggttgcggatcggttgcagcgcttgggaatatcaagattctttgagccacaaattgaggaatgtatcgattatgtattcaggtacgtacgtacttaataaaagtgctgacaaaatgtactgtatatttgaattttgttgtttcttagttaatttattttttacatttggaatgtttagaaattggactgagaaaggaattggctgggcaagaaattccaaggttgaagatattgacgataccgcaatgggtttcagactactaagattgcatggtcacaaagtttctgccggtacgtatacgtacaaatgtgtaaataatatttactcgaattttacataatattccaatcaattacattgttttaataattaattgatttgtaatatgtggttgttattattattagatgtgttccaacactttaagaaaggtgacgattttttctgctttcggggccagtcaactcaagcagtgactgggatgtataacctttatagagcttctcagttggttttccctggagaaaaaattcttgaagatgccatggaattctcatcgaaatttctcagaaaaaaacaggcgtccaatgaattgctagataaatggatcataacaaaggacttacctggtgaggtatgtatttagatatttagtttttgtagtattatatattttatgtatatatactagtagtatatgcttaataactatttttatatttatatttgttgttgttctttctattccagttctgcttcgtcttatatactagactttagtaagatgagcctacgtaaacaaagtgccatcgctgtctatcatcataaatattcctttgattaggagtgtaagatagagacgaatagaacaaaaaaatatgactatttaatccgatcgaggacgagaaaatcgatcaaaacaagttagagaatcagagtacagcatctttataagacataacctattaacaataattagaagtacaaccttttttttttcctttctttctttttaactggaatgaattgtattgtgaaaaacataacgcacttataccatccctcttggggccatagttggtacctggccttttttgctgtgatatctgtcaaagattctcaaaacaaacaccaatttatttctaatcgtagatataatttttattatttatttcgtaaaaatattaatttaattatggtcactatctataaaacgataaatattttagaagctagtgatataggagcctagttttcagaaaattttagttattggtgtcgaaattataggattctcgccacattaggagtgtctctagcctaatgtgtgctctattaattgcaggctacttgatcacattcactaccctaaattattcgaaatttatataattataatataaaaattaatatataaaataaaatagagttacaacaattcatatacaaaaatgtaaaaaatttccactagtagtaaaaaaaaattactcagctccttacatatttataaatatataacacaattacttgttaggcatggcttaaaaattgatactattgtatgtcatttttcagtttcggcaatttgagaaattatattacaaaatattttatttgatattgtataaatatagtagatattttgccaactttggacaaatttttaataatatatagtttcaaaattatagctctaagtactctattttttatgccgcaaaagaaatttgatacgtgtgccatttgaactttcaattttacggtagattatttaatatttttcttttgaaaagattatttaaatattttgaaaaaaaaacaaaaaaagcggaatagcttttccttctagcctagtgtatcatctataattaggttatgaattttttctaaaaaaaagtcggaaacaaaaaacttgacactaataagccaacactcaggaattctctattttttagtattttactaatttaaaaaacattatttattaatacgatcaaaaaagagaagcacgtggcttaggaaattacatactaaacacagtcggtctattatttgtggagatagttacaaaatgtatgatcagaaattgattcccttctgcgggccagtcttaagctgtatgtgttctaaggtaaaattaaatttttgggctctcttatatatagtttaattattataaaatgataattttaatcttttacggctcgtttggaacgccgtattagttcgtattgtattgtattatattatattaaattgcattttatgcaatatttttatgtaaaaccatatgtgatattaaatttaatggacacctaaatatataatattttagtataaattaaagtttaacatagtattatataaaaatatgatatataatccaattcaatataatataatacaatacaatacgacctaatacggcgttccaaacgagtccttagtgtaatgataaagctttaaaaaaaatttaaaagttttaaagttcaattttttatagctacatattaaatatttttttaaaaaataaaaaactagagattaagaattgatcccttgacctcttgaagtaaaataaaactttttactactacaccaaataatatttattgtattttcttcttatttaatatttatttatatattaataattttttattcataattttgaggccctaaggagtcggcgaactaggcgtgcgcctcggtcccctgccgcatagggtcccgaaattgtgaagaaaaaaatataaatatataaataaaatattaaataagaagaaaatatcataaatattatttggtacagtgacaaaaagttttactttaagccaagtccaaggatcaatccctaatctctacattttttattttttaaaaaaatatttaataatgtacaactacgaagaattgaaccttgagctcttaagagttttttaaagcgttactattacactaaagtaatataattaacatttaataataattaaactatatataagggtctcaaaatttaattttactttacgccctatataccttaggattgacactactgattctatagctatttttctttttcaaaattctttttgttacatatatgcagggccggccctgaaaatatatgggcccaagacaaattaaattttggggccctcaaaaatatataaaaaaaaattaaaagaagagtgttatgggatttgaactcatgaccttggactttatgccatctacttcaaccaactaagctataaatatccattgcttataatacacttaaattttacttaaataaaagcctaataatttttttttattcttttattttgggtccccggaaagtgtgggccctaggcacgggcctagcccgcctatgcctagggccggccctgcatatatgtaaccaacttattttttaattgtaaattaattttatattcattacctatgaaatatcttgagtaataacgcttagcttaataattttcagaataattagttaataaaacaacaaattatataatgaaattatattaataccgccgttagtttcactatttattagaagaaaatatttacaaataaatgaaattctcacattcctctctctcagtctttgctgacttgtctacattatcattactcaatatgtacgttatatatactgaaaaattaataacataattgattattaatattagacatcagtaataatcactaatattaattgattattaattttagacattaagacaggcaaaacaggaggaggtattttttttttaattttacctcaattttttttttatctattttacttatagatccactttttatatatttttttacgttaatattataattattaataaataaattaagaaaatgtacatattatatggaaatatattaatttaaagacattaagaaaatattaaaaaaaaatagctactacattcatattcattgaacattttagtttaggtaattgagaaatattaattacaacctcttattcaactttcacgtttgaaatcacatatcgaaatattttttttcaaatttttttatagcggtattcgttatagttacaatattattcctgtaagtttttgaaaaattccgaatagtttaccgtaccgaaaatagagttcatgatattccagtttaccaagcgcgttcaaaaaacttcaaacttatttttggcaccgtaaactattcgaaaattttcaaaaatttacagggatgatgttgtaagcataacgaacactcccgttaaaaaaatattctgacatgtatttttagacgtagaagttaactaagaaattataacaggaggttgacggtaacactcctcgtttgatacttattttgaccttataattaggataagaatcagcataagtatctaactaaattaataatacagtggaatctctatccaagaatacacttgggactaactaaattatattctaattgggaggttataactaaatagagttataactaaatagagttacactagaaaaaaaaattaaaaaaccaaaaaatatcaatataacaataataacaataaataataattaataatatatcataatagaaatattttagaataaatataatttcatacatgtattataatttaaaataaaattattaattttacgtaaataaatttataaaatacatgtatatattttattaaaatgtaattattcttatatagaggtacactttgttaatacgggacttagaaaatgtataactaattacaatttagaggttattcttatttataactagccgaaatcgggacttgatttttttataacaaattagaggttattcttgaataaactattcttaaatagagattctactgtagtagtctgcaacatttacatagatgatatatatatatacagcgtgcgactggtcatcattattaaagaaattatttatatttatatgtcagttcacgagttaattacatcatactctattactttttatctctcatgcatgtgcgttttatttgaactttattaattatgttaatattaatgaccacgttatcaaaataaataaaagtggaaaagaaattccaaaggaagatttctaataatgagtacacacacaggtgggtttcgcattggaggttccatggaatgcaaacttacctcgagtagagaccagattctacattgaacagtatggtggacaaaatgatgtttggattggcaagacactctacaggttttggttatttctatatatcattattattttgtatatttaattatttaattattttcttaatcacgtggggtgaccactatggtatttttgaactctcagaatgcgaaaagttaacaatgacgaatatctggagttagcaaaacttgattacaacatttgccaagctttgcattcgattgagtggcacaatttgctaaagtacgttcaaatttttttataagttaatttatgtggcatgtatatataatatatatagttaagtacgtattcgtaagttgcatgaaattaattactactatgtacgtggatacagatggtaccgagattgtaagttggaaaattatggagtgagcagaaggaacctcctcttggcctattttcttgctgcggccagtattttcgaaccggatagggccgatgagcggcttgcatgggctaaaacggcagcactgatgcaggccatccaatctcatttcgatgaccagaaagcttcttcggagcatcgtatagcttttgtctctgcttttaaaaggagttgtaacatgccatcgtatttgattacaaggtaaatctctttctgttaacttataattaacttttgtatattgtcccttttagctagctaagcttaattaagattgtttttgtgaaaagtgaaatgtcatatttagtattttgttttatgaaaagattgtaacatttttatttttatacttgttattttacatcataaaaaagttcttgtttttaagagataagccttgttttattatataaatatatttttttgaaagctatttattattattattattttagtgacaaaagaatgttatatatgggacggcagaagattccaaattgcaattttcggacactgttggcaatttgctttttatagattttcaaaatagtaagtatagttatctaaatttctttcctgccgtaccccacttttcaatactcttttggaaatagttccataattttttatgttttttttggaccattgtaaataaaaaagaatggggctcgttgctttcctttgcgccgcacaatattgttttaaaaataataatatcatttttagcaaatgttttttttttttgaaatgaaatcatttatgtttaggtggctttgtggttgccttacatttggatcgatctaaatgtatgtcatgtgacaagaaaattaacaagattaatcgaatataaaatgtattaattgttggtccctagattttcttaaattgatgaaagtctaattttttcttttcaaaagattgtttttaattaggtatattataaaaagacaagataatatataatacatatttttttctgattaaaaaattaattaaattgtattatatatacaaatttatgtgcagggtgtcgaacataagtgatacagatcatggccttcttagaacgttgatgacgactctcagccacctctctttggacacaatgatgctgtatggtcgggacatcacccaccatttacgtcaagctgtgagtgccatcacttttttgcatcatatttaacttaagtgatctcttataattactgtagagtgtgcaaatcgtgtcctgtcgcctaattaattttcatatcagacatgtcttgttttttactagtgcctaattgttatttttatgttttttaactttaactcacaaaaacttgtgaggtatttggaggtatttgggtagacaagctaggcgtgcgccttaggcccttgaccgctcaagcctcgaaatcatgaaaaaaaaaattattaatatatagataaaatatgaaataagaaaaaaatataacaaatattatttggtttaatagtaaaaggttttcctttaagtcaaaaggtcaagggatcaatctttaatctctgcttttttattttttaaaaaaaatattcaagagatcaatctctaatttttatttttttaaaaaaatatatttaatgtgtaactacgaaggattaaatcttagagctcttaaaatttttttaaagctttaccattatactaaagcattagaacaaccattttaataataattaaactatatatataacgacttcaaaatttaattttaccttagctatcacatactttaggaccagccctatttgagttgtgtcacctaaaaatctgtttagctacttttagtggctggcattgtagagaaagagagagatataagttaaggttagtatttttaagataagttagatgtacttaaaaaattaggattttggatttttaatttttttttaaaaaatattttatgtgataagttagtgttaagtagatcgtgttatgtttactttatgttttattttgatccacttcaaatatattttttgaccataattcgtgaaaattagtatcatattcaagttgtggttattgtaaaattcgtcactcatttaaaaaaaaagtagtttaaattctaaaaatataataataataacttaaaatgttgaatacagacttaaatattcaattacatggaacataaattactcattattttcttaaaaaataaacaaaatactatatatagttatgtgatcaagaaattaaaatttatatggagaatacgtatctatgtgacgtcatgattactcactagcacgtaggaactattttcaatcataatctactttaaagtcaaaattagttgtaaaaaagaaattcaagtactttattttatttttagaagaagcaacaaccaaacatattcttgtcaaactgcaatcgattcaatatatatgtcgaatgtaaataatgcactcaactttatatatatatatcacttcaccaccacatgtgcattgaaaaaaaatcgtacggtgatattagagctgtatatgtatactaaaggaataatttcaatgaattctgtctgttttaaccccaaaaaataaaaaagaccaaacatacgtacatataatctatcaaactgtgtagttttcttcgaatctgtacttgaacgtctaaattttaatattgtagccaaaaattcttaaatatagagtaaaagattccacggcaccgaatgttatctatacaattttgagcaaaattaaatgtgatttttttttttttttttttgtatagtgggaaaagtggctggtgaagtggcaagagggtggtgatggacattacgaagaagaagcagaattattgatccaaacaataaaccttagctcaggccgtacacttgtgaaggccctcttgctgtcaaatcctcactatgaaaaactcttcagtaccacaaacaaagtttgctgcaaaattcgtcactttcaaagacaaaggcatagggccaaggttggtatatatgattcacaaccatccacaacacatttatattttaattaattttgtttgacttagacatttcattaaacagtcacactattgaaaagtgtggacccagtaaatcatctttgtagatacagtccattattatttgaacttttttttttctttggaatgatcaatacaggcaaatcaaaatggagaatttaacagaaacatcttaacaccagaaatagagtcagatatgcaagaggttgtgcaattggtgctacaaaaatcttcagatgacatgatcaacacaaaaattaagcagacatttctactggtggccaagtctttttattatgctgcctactgtgattctaagaccatcaatttccacattggcaaagtaatatttgagactgtggactga

SEQ ID NO: 163 - DNA, 5733 bp, Cannabis sativa
atgctattctcaaggggatttcgtcggattccgaccaccaccttcaatgggttttcccgttggttcgtctctcaccgacccgggtactcacagtcacagaccactactcattgttctagagattcaacccacaaggttattattactgctaatgaatagattcgttgtttcaatcatatggggtttaatcaaggtttttgttttgatggctttcgttttgtttggtagatttttggcggtttcgaagaaagtcgtttctggggttttgctggctctagataccaaattcatcaccagagtagctccttagttgaggtaagagtattgggtttgctttcatttttgatttgagatactccattttcaaatgttgagcatttgatttttctttttcaggaagaattagaccctttttctcttgttgcggatgaactctcacttgttgctaataggttaagggatatggtagttgctgaggtatatgtttgatttgaacttggaaggaataatagtttggtgttttgttcatatcattaggatcaagttttgatttttcctacattttgatcagatttatataaagggtttttctcattttgtttaattcaggtgcccaagcttgcttctgctgctgagtacttctttaaaatgggtgtggaggggaagagatttcgtccaacggtaaacagaatatacatcccatttgaggatcttatagtttcataaaaaaatgttaaatttgttcttagttttatttgggttcaatcaaatcaaactcttcactttcaaattgttcattcactttgttcttctacagtgaatttcttattactgttggtaatcatttgttacttttctaaaaaaagtaaagtatgtattacttatatgtataactattttaggaattacataatgctttaacagtaatttgaaacttaatgaatttaggtttgtttactgatccattttctttgtgatattgactttacatcctgttatagagtcagtgatgtgtgattcaccatgagtgtgacttatctttttatatgtttcggttaaattacaattactagttcattcttctctctcattttttttttcttgaatgcaggtattattgttaatggcaacagcattaaatgttaaggttcccgagcctgctaaagcgttagcagatactttaacacccgagttacgtacaaggcagcaatctgttgcagaaataacagagatgatccatgtgagcccctaaagtattttgtaaatttcttttgaatatgttaaatgaaaaatttgttatttgaaaagtccaagaattacaaatgttcatcagatgatgcttggacatgttaaacatgattgttcaatgaattcgactgccctttatttgaacattattgttctgtggcttaagaagggctttaacaaccaaatggttcaaaaaatgctgtccaatgtttatcaattcttgcgataatgtaaccttcatatatttccacttttgactaatacatataaaaagacaataatgtgtagttgaaaaatgaggatatattcctgttcgtagcattcgggtaacatacttaaccctagcttttgcgatcaaatgatatatttcgaaaagcttttcttgtgatactttgtgaaccatgagtaaccatgagtttcccattacattggtttggttatttttgaaggcagaagtgttcatctcgttgattttccaatttcttagtcgaaagcttgatcctaatctatttatattaatatgactgttgtcttaggtggcaagcctactacatgatgatgtcttagatgatgcagaaactagacgcggtgttggttcgttgaattgcattatgggaaacaaggtatatctgtcattattttttcattcattgagtttcctttctttttgttttatcttgtaatatttttcataagatgcccccttcgagattggaaaagtgaaactaattttttatcgaatttgctgatgttgagtcttttattttaagattgacagcttaggagtgaatatattgacaatttgatcttttaatttttattcttgcattgaaagaatcttttgtattctcttgaccttttctgcttgtagatgctagctaagttgtatgtaattaaatttaagattaactaccttaatatatcagccatgcttgattttttatccgttttttgtttctcgtccatcctgagacaagaggctaggctggtcaagccctctctgttagtgaggcccaaaattcaggtgaggatagaaaatcttagattgagtgtcattctgtagctgatatgattgttgtcagtttttattataccgtaaggtaagcaaagacaagctgagaaaatagagagcgagtttagttatatcacaggaagctcaagagtcccagtttctcttcaagagttaaggttcgatatagattagaataagcataccctaaccctacactctcagactattcaattcctaaactctccatacaaaacaaatatcaaaagagaaacttcccaaacaaacgcattgatacaataaataaaaccgaaagaattacataatagaccaaaaattttaaaaaaattacaaaaacacgtcaacacagaaaaaatttcatttttactctttgaacttttttatatacaaaaatacttcttcagtaaaaacaataaaccgtattttagttgttttatagtttatttataattgtcatgaagttgtttctggctgttttatagttgatttatagttgtcgtgaagttgatttctcgttgtattagttgttttttaacattttgctgaacaaagtgtattttgtattcttaaaactttacaagagtatttctcgtaattaaaaattttaggctgtaaaattataaataaaacataaaaaaaaaagtatttttgaaaatttcccagtaaaattttatatgcatattcccttcccctcctaattctttctactagcatatgcgtaccgagttgggggtctatcaatttcacattatgtaggttggttagagtttaaatatataggagacgaatgtgtatacatgtgctctgggctgtagcttaattttttagcttctccttcttgtccttttacattacaggtatcggtattagcaggagattttctgctttctcgagcttgtgttgccctcgcagctttaaagaataccgaggtatgtctaccttctgcaagtgatattgaacagtgatacagaagtgcatacatcttttttaaatcatgattatttagacaataatcatgcgatctttgtctttaatctgtaggtagttacgctactagccacggttctagaacagctcgtgacaggtgaaaccatgcaaatgacatgtacatctgaacaacgttgtaggtactaaatttcagtgctttcgttaatttagtatttcattctctctgttccatatgctagaacctagaatttttttattcaaactcatagaatctatttgttcttctccttctcttacttaccaagatttatcgagcaatatgctctaagaatagaattaggaaaatgctcgacattagttggaaacgtaatactactgaaacaaaagtggaataaagtgcttgtgccaaaagctgctcaagagaattgataacgtaatctggctttgaagggtacgttatgttcagtacttttagccattttggataaatagctcgctcccgggtgagaatcgctgcattattcagatcaaatcaagtcaatgccagtgcagtgatgttgaacaaaagaaacaaagagagaaagtagaggaattttgataggattagagagagcgagagagagagagaatgaggagattcttagcgaggaaaactgatgtttcgattcttttcaagtcttttgactgaagaataagaataggaaaatctagaggggtggttaccggttagtcatatggtttgttccctcaaggtatgagattcaagtcccgtgcctacatagcaagtgttgtaatttctcggtccccaaatattgtagggttaggtggggtgcccagtttacgaaacgatatgtatttttaaattataataattggggctgattgcaataggaaatctgaaaaaccattaaatatattgaaaatgatttagaaaaaacaatcagaatcaattttcttttctttatttcgttttattttacatgtatttaatttcattcttaagctgattttttattcctcttgcagtatggaatattatatgcaaaagacatattacaaaactgcatcgttaatttcgaacagttgcaagtcggttgcagtcattgctggacaaactacagaagttgcaatgctagcattcgagtacggcaaaaatttggtaagtgaacccttggaattcttttcgttctaacacgaaacatgcttcgttatatttgtttcattgcacattgtctttgctgatgggtggctggcctatcattcggggtacttaacaagttcatttttcatgtcctttaaatatctaccgagaaattagtgataagaaaactgcttcggaatttattttccagtaactcaacccaatattctttctactcggcttcaacttgtctcatcgatatcaatattatttgccaatctacttcaaatattcttttatgaattaaattttcgataccacttatttttttagcatcatcaccacccgtaaaccatgtctttggaagcctaagtttgcattattcaaaatttgaaggtatccttgtggctattggcatacatgcactaatattattttcaatcttagctgatgtaaatctgtatatttttcgttacagggtttggcttatcaattgatagatgatattcttgatttcaccggcacgtcagcttccctcggaaagggttcactatctgacatccgtcatgtaagaaatcttttaacatggtttatttttagagtttgagtttcaaaagaaaaaaaaggctggtcatacctaatctgttgttttcacattcgaacaatttcactccattgcgaaattctaaatcgaacagttcccatgcagatcataagagaagtaattattaattctgaagaagaaaatattgctttgacaattagaactctcatccgaaatcttgctctacaaaacatgattttttctttaaggcctcatgctaatcttgcttaagaaaaaacttggagaatataataacaaatggtagcaaatagcaatggctttatgtttattgcctgtcccccatgtctttgcataattctattaaaattttgcagggtattgttacagctccattattgtacgccatggaagagtttcctcagttgcgcgccgtggttgagcagggatttgaaaaccccaaaaatgttgacattgtaagtactttaaaaccgagtgttgtatgcataatttgtgatgcttgttcatgttataatgtgacatacccctatgaacgggatcatagtgtaaattgtgttcttagcataaccgagtaatgatgcacgtaaaattcaaaaaacacaggcactcgactaccttggaaagagtcgcgggatccaaaaggcgagggaacttgcaataaagcatgcaaacctcgctgctgaggcaatcgagtcacttccagagagcgatgatgaagatgtaaaaagatcgagacgagcactagtagatctcacccaaagagtcgttacaagaacaaagtga

SEQ ID NO: 164 - DNA, 6577 bp, Cannabis sativa
atgtctaccaataataataataatattaataatattatttctcgaagatcagcaaactatcaaccttcactttggcattttgattatgtacaatcactttctacccctttcaaggtaacaattattattattattattattattattattattattattattattattattattattattattattattattattattatatgtgcattttctttgttaattttgatgtactaaaagaagttatataactcaattttttctttattatataaatgtgtagatatagttagttatatttatatgtacattttgaataatttgaattataacaaactttctatcaatatatattttttttttgaaattttttaaataatttttatcgttaaaaataaaatttaaaatagttctacgtgtataaataaatacatttaaaattaattatttgaaccaactcattttcaatattgcatatttttatgagtttctcataatatttatattttccactaatcaacccgaaaagggttgattggaattgaaaccctattctgtttgttagttaagaaccgatgcaaatttatggtggtataataatataggtcatatatatcttaaattataaacttgatataaaaattaaagataccaaaataatatttatatatatatatatatttagatatgtgtttgtgtggtaggaaggagcatatgccaaaagagttgagaaagtaaaggaagaggtaagagtaatggtgaagagagcaaaagaggaggagaagcctttatctcaacttgagcttattgatgtaatgcaaagacttggaatctcttaccactttgagaatgaaattaatgatacattgaaagatatatataacaacaataatgtgtacaacaccaacaataatgtgtatgccaattctcttgaatttagactcctaagacaacatggttatccggtgtctcaaggtatatatataaatatatatataatactttttctagtcctttattttcacataattaacacaatcatttgatgaaaattattattatgaatagtagttaaatttaatatttcaaattgtaaatggggtagtctattttaaattcaactactactcatcatcatcatatctaatatgtcaccttataatagtattatgcatgcatattcttagatataatataaagtaaaagttttgatgtgtatatttcaaattatacaaatttatgaatttttatacaatttttgcaaaaatatggttttttttttctttcaaaaatgttatttccatatggaaaaattcaaaaagattataaaaaagttaaattatgaaaaaaaaaacaatataagataattgattatccatctaattacgttaaggataacgctgaactattttttttcattatttttaactattcttaaatttcccataaaatataaaaccatgttttgtaaactttgctaaaagaaatataaaaatgaaaatctctttccaaaatgtatggctaattcataccaacattattgtttctctaccatattttgatgataaattaataattacttaaaatgtttggaattactataattaattgcagaaatatttagtacgtgcaaagatgaaagaggcaattttatggtgtcttccaatgatatcaaaggaatgttatctttatatgaagcttcattctatttggtagaaaatgaagatggtattttggaagagacaagagaaaaaacaaagaaatatcttgaggaatacataatcatgatcatggaaaaacaacaatcattattagatcaaaataataataatgattatgattatgattatgaactagtgagccatgcattggaacttccacttcattggagaatgttaagattggagagtaggtggtttattgatgtgtatgagaagagactagacatgaaccctactctacttaccttagctaaactagatttcaacattgtccaatcaatataccaagatgatcttaaacatgtcttcaggtaatataatgtaatgcatttattgggtactttaagatttcttacacatattgggagagtcgaatggggtataggctaaaatatcaagcattattattgggcatcagtggtgtccaacaccttctatagctaacgctctacgattagctagcaatattcactaaaaattattttattaagttatatgagatccgatacttaattacactaatagtagtataacatcgagaagggtactagacaccaatgatattttttagcaattctctaaaatatccctacatttggccgaaaattttcgttaggaaaatgccctaattgttttaatcaacgaaagaaactccgatttgaaatttttgtccaaaacccctacaatgcttactaatcgtgcttgatatggtgtaatgatattggacaccttaaaatgtgacgtaacgttattttattttattataacatgtacgtatatgcagctggtgggaaagcactaatatgggaaagaagttggaatttgcaagagatagaacaatggtgaatttcttatggacagtaggagttgcatttgagccacatttcaaaagttttagaagaatgattacaaaagtaaatgctttaataacagtaatagatgacatatatgatgtttatggtgcactagatgaattggagctcttcactaacgcagttgagaggttagtataaaatataaattttgctacttccataatgtggggaaacttaattagtactattttaactatcataagctactttactaattatcaattaattctgagattaaaattcacacttaattagtactattctaatatggtattaaaattaaataaaactcttactagtattcgatctaaatagttgagcaaaacagagttattattgtgattcgaggataatgaaccaacaataacatcttatatatgattcattcgtctaaaattagtgagagagtctcacaatattgataatgtgtgaaacttaatactacttataataaaatcatggattactattttatacctttaacttattgccaattaattttgagattaaactctatattgcttattatcatacactcatcctattttgtaaactatactcccaaatttcaactacaataataaataataattaataattaatacatgatgattttcttttcttttcttaattattattatatatttgtatgtatagatgggatattagtgctatggatgggctccctgagtatatgaagacatgttttcttgctttatacaatttcataaatgatcttccatttgatgtgttaaaaggggaagaaggcctccatgtaataaaattccttcagaaatcggtaactgattcttatttgttcttttggtagggatgtaaacgggacggggcgggtgcgggaatcgctcccccactccatacccgcttcttaacttcacctccatacccgccccaatactcgtttaaatttaagtggaggcggggcggggattactcgacgggggaagaattcccatcgggtacccattacgtacatatatatttttgaaaaaaaaaatgatgtctcaaagagaattaaaaaaaaataatcataaaaactcagtaaaacaataaactaaaatggaatagtgtgtatagtaaaaaaaaaaaagagtataatcaataaaaaacctaaagcatgaagttattttaattgtagtggttataattttaaaacttaaatttatacatatatcatatcggggcgggtatctattctcccgcccccaccttgtttccgactctggtatgaatatttaaacacatacccgcctctgcctccgaaagtcatcccttgttccggctccattaggggcgggtactcgcgggtattcgaatctgcgggtataattgccatccctatctttttgtgttaagagtattgggggaaattttattttttatgggtttattttttaattgaaaaagtttacaaaaaataaaaggagaagttgaagaatacgctcttttttaaaacttaactaaatttacatccaaataaagtgtaatttaaatatttttttttatgagtattgtacttaaattaccctcacactctcacataattaagacataatttcgaacataatagattatattctttggagatagatgtataggtttgtgagaaaattgggataaaattttggttaaaaaaagaatggagactatcgtgaaatgatagggataaattaaattggtaaaatattttttttaaaaaaaactaggtaaatataatagattttgaaagagggggtaaaaattaaaagcatcaattttaaagaggtatgtagtatattttcctcaaaaataaatatggctttttttttttcttcaaaaaaattactttatgaaacactcaaaaatttatgggaaaatcaatttaggtaaaccagattataattggtaaccagttactttacactattttttttcatatttttatttatatatatatataaatataaattgccattaaataattttttctttgaaaaaatgtcatattcttttttacaaattgtgtaaaaatccatattaggtgtaattttcactttatattaatatatggtcactacaaaaaattgttacttttagtgacaattttttaatcactaatttttttgtgactaaatgtgatttttagtcacgataaaatattacttgtgactaaaatataatattcagttacaagttgtcacaataagtattgtgactaaaaatatatttagtcacaataaattataattttcgtgactaagatctttagccacagaccttttagttatcacaacataagaatgatgatttataattagtcacaaattttttacttttagtcacaagttttgttgtgattaaaaataaaattttttgtagtggttattttattgggaaatttacacaatatatttaaaaaaggaacttttttacaattttttttttatatttttatgaatacttttttacatttttttttcacagaaaattattactttttttatgttgctttctcgtagcaagaatgtcaaaacaacaccgttatgaaacaacgaaaaaacaacactatgtgtaattgtaaaaacaaatcatgtatttttccgtagcagcaacatcaaacaatatttttttcaaaaacagcaaaaaagcaatactgtattttttgttaaaaaaaagtaaaaatccatttataaaaatattaaaaataacaataaatccgtaaaaatgtaaaaaaaaaaattatttttatatatttatgatattatccctatttattctatacatagtcacatgatgctttttttttgttatgttttagtgggcagatctttgcaaatcttatttaagagaagcaagatggtattataatggatacacaccaagatttgaagagtacattgagaatgcatggatatcaatatcaggacctgttatactatcacatttatacttttttgtagtgaatccaaacatggaagatgccttattaagtacttgctttaatggataccctaccataatacgacattcatcgatgattttacgtcttacagatgatcttgcaacttcaacggtaatgatcgcaactttataattgtgtgactgttttgtaggtatttttaatatttttagtcaattgataaattataattctatttttttttttatcttattatatgatcgtgtataatatagttacatgcatgatacaattttttaaaaaaattcaagtaatttagaatgaattgaaatgacaatttaaacaatttattacatttacataaacaacgtgttcaataataaactatttaaatcttggtttcgatattctaaattattaacaagtattatatataaataaaaatatattttgaatctcaaaactaattaaaaagtactctatacatattgtcttttaactttgcttatcatggtaaataattagggttaggcttaggctaagacaagttaactaggttcgtgcctaaggttcactcaatctaggggcttaatgattttttttttaaaaatatatattatcgtaataatttttaatatcatttttcttaatgtctaatacaattcaaagtcagcactgtatatattaatattatacatatataaatatttttttaggatgaattgaaaagaggcgatgttcccaaatcaatccaatgcaaaatgtacgaagatggtatatctgaagaggaagctcgtcaacgtattaagttattaataagtgaaacatggaagcttattaataaagattacataaatttggatgatgatgatgatgatggtgatgactactctccaatgttctatgagtctaataatattaataaggctttcattgaaatgtgtttaaaccttggtagaatggcacattgcatttatcaatatggagatggacatggaattcaagatcgccaaacaaaagatcatgtactatcattacttattcaccctattcctcttacccaatag

SEQ ID NO: 165 - DNA, 5419 bp, Cannabis sativa
atgcagtgcatagcttttcaccaatttgcttcatcatcatccctccctatttggagtagtattgataatcgttttacaccaaaaacttctattacttctatttcaaaaccaaaaccaaaactaaaatcaaaatcaaacttgaaatcgagatcgagatcaagtacttgctaccccatacaatgtactgtggtcgataaccctagttctacgattactaataatagtgatcgaagatcagccaactatggacctcccatttggtcttttgattttgttcaatctcttccaatccaatataaggtgaattttatttctttttgtatataatttattatttctttatcttatcactaaaaatttgtagttaaaagtattacactaaatattattttttaataagaaataatttttttttataactaaaaattagtcacagttttttattttttatagcggtgatatatatatatatgctacaatttttcccatatgatgataatctttaactattattatacatggtacaaaattaaaacaacttttcctagagcaaaaagcatcgggaaaaagttaggtgaaaaattcatgtttagggttttgatcaaataactcgattaaaaaaacataagaaagaaggtttttcctaaaaaaatacgaattttgaaagttttcgcattatattcacatgtaatatgagaaagactaaagggtatcagtggtacttagcaccctcctacgtgtcaatatattactattggttcaactaaatatcgagtcccatatagtttaatgtaataacgtttaggtgagtatcgctagccaatcgcaaggtaacacgtctagaaagtacttagcattactgatacctaatagtaatgatctatgtaatactttcgtgtacatatatatgacatattagtttgcttaataacacgtgctcccaataatattaatatatattattttgttttaagaaacaatatcatcactatgtataatatttttgagcattgctattaggcaccagtggtgcctagcaccttctcgacatgttacgttgcgattggctagcgatactccctaaaaattattatattaaactatgtgggacccgatacttagttagaccaacagcaatactgacacataagagagtgctaagcaccactgataccctttaacatttttcaatatttttgtatttattgtaaagtttattgtttattagacttttttctaacacgtgtcatttggcacgtgcccccatatatatgtacatgcagggtgaatcttatacaagtcgattaaataagttggagaaagatgtgaaaaggatgctaattggagtggaaaactctttagcccaacttgaactaattgatacaatacaaagacttggaatatcttatcgttttgaaaatgaaatcatttctattttgaaagaaaaattcaccaataataataacaaccctaatcctattaattatgatttatatgctactgctctccaatttaggcttctacgccaatatggatttgaagtacctcaaggtatgtatattatagatacatataaacaattaattattattattaattaaaatatctattttatataaaatgtggttatgcaacgaaatttttgatttaactgtattttttaattttctatattaactttaacagatcgagaatatgccaattatctagaatatctctaaattacttaatataatattctttattaattttctaatattattatatgtatttaaaaataaaattatataaatattttataaaaattatgtagatattatatctaaaaaaaattaattttattgtatatttttacattatacaagataaaaaaaactttgggttgttccaccaactgaaaaaaattagaaaaaattgttcggtaaaataaagataatttttttaattagtttgacttaaataatttttatataaatatatttttgatataatgtaaaaaattaaatattttgtgatattttatttaattaaatagataaactaagtataaaaatttaaatttctcttttattattcgtaattgaattcaaatttaatggtttaatattgagaagtgttccatatatatatatatgttaaatatataatttgtattatgttattattgcagaaattttcaataattttaaaaatcacaagacaggagagttcaaggcaaatataagtaatgatattatgggagcattgggcttatatgaagcttcattccatgggaaaaagggtgaaagtattttggaagaagcaagaattttcacaacaaaatgtctcaaaaaatacaaattaatgtcaagtagtaataataataatatgacattaatatcattattagtgaatcatgctttggagatgccacttcaatggagaatcacaagatcagaagctaaatggtttattgaagaaatatatgaaagaaaacaagacatgaatccaactttacttgagtttgccaaattggatttcaatatgctgcaatcaacatatcaagaggagctcaaagtactctctaggtaaactatacattataaagataatgttttacgaatgatcatcattgctatttggtaccagtactgcaggtatgcttggcaccaccttgaggtggcgctttgcgattagtttagtaataatattccataaaagttattgcattaaattatatgacactttatacactggtgccttttagcatttctccttacgaatgattatcactagtatgacatcatagcggtgttctgagcaccactactgattattttaagtggttttgatcatatatttgtgtagatcatagaaattcaggagacagccacaaacacgttttcacaaatattcctaaaataatctctaatttgtagtaacaagattgaaaactatagtggtagattgggctgaattaggaaacttttcaaatcgattcaagatcacaatttaaacttttcaaataaaaggtctattttttttcttatttatttattttacatttaaatccaatttgttatttttatgtggaaattccccttgttttatacacaccaaaattttcaaaattctcttccatttattgtttgcacattttttgggggctaatttttaacattagaacatggtctctaaaatatttataatcaccctgcttgattactgatgagaattatgagttccatctcagaactaactggtgatgagtggagtaacccatgttcttatatatggctcaatacttttacatttaattcatgtgggataatgttctccaatacttaccaccactttgaggtggtaccttgcgattggtttataatattctataaaagttatatgacaacttttagtatttttctttacgaatgattattatgagcagtatgacatctcgtagcggtgttatgagcaccactagctactgaatattttcaagtggttttgatcatatatttgtctatatatataaatatatatatttaaaggtggtggaaggattctaaacttggagagaaattgcctttcgttagagatagattggtggagtgtttcttatggcaagttggagtaagatttgagccacaattcagttactttagaataatggatacaaaactctatgttctattaacaataattgatgatatgcatgacatttatggaacattggaggaactacaacttttcactaatgctcttcaaaggtaattacctaatacctaattaattagtatattataatgatatcacattttttattacctgttataacagattactaattagtaaaaatttaatttttagatttcaattaattatatgcttaaaataaatttcttttttttaattttaataaaacttttttatttttatttataagaaaatagataaactaaggaaaaagtatcagattgaaagtaattcattaattatttttatttattttataaattaatcgcaagtgtataacaataatatcaaaagactaaaagtaaatgtaaccatcatggttaaatatttgtatgtaatcatggaaacctcctctctttctatatatatatatatgtatgtatattaaacaaaattaaacttatatttgtgtaaaaattcaattggttttcagatgggatttgaaagaattagataagttaccagattatatgaagacagctttctactttacatacaatttcacaaatgaattggcatttgatgtattacaagaacatggttttgttcacattgaatacttcaagaaactggtaagtttgtattgggctttttagttgtaatatattggatggtttctttagttgtaatatgttggaaacgccaagtattaatctgtatttatacacacacacaggaactccaatagaacatgcacgaaagtatctcacagaaccaagcacaaccataagaaaattgagttgaatgaattactattttattgattaatctgtaagtattacaagttgagaaaagtattcttttctatgtattaaaaagaacaaaagctaaggctatttatagaagacttaagtgctaaagggtaccaactgtcataactgtcaagaaggcagttatgacagttggatatacaaccgaaaaccaggaacaagaatacctaactaactgatccacttatcaggacacaacttctaacataatgtattgcatgtttaatactattatctttttttatctttaatatatatgcatgtagatggtagagttgtgtaaacatcatttgcaagaggcaaaatggttttatagtggatacaaaccaacattgcaagaatatgttgagaatggatggttgtctgtgggaggacaagttattcttatgcatgcatatttcgcttttacaaatcctgttaccaaagaggcattggaatgtctaaaagacggtcatcctaacatagttcgccatgcatcgataatattacgacttgcagatgatctaggaacattgtcggtaagctagaatatatatttacaatgtggaaattattattattattattattattattattattattattattattatttaactttattaattgattaggatgaactgaaaagaggcgatgttcctaaatcaattcaatgttatatgcacgatactggtgcttctgaagatgaagctcgtgagcacataaaatatttaataagtgaatcatggaaggagatgaataatgaagatggaaatattaactcttttttctcaaatgaatttgttcaagtttgcaaaaatcttggtagagcgtcacaattcatgtatcagtatggcgatggacatgcttctcagaataatctatcgaaagagcgcgttttagggttgattattactcctatccccatgtaa

SEQ ID NO: 166 - DNA, 2398 bp, Cannabis sativa
atggagttccaacaaataataccctctttccaagtccttctcttttcattttttatgattattgtggtgagcatactcttgaagagagctcaaacaagcaataggtcagcttcaaaactacccccaggtccatggagactacccttcctgggaaacttgcaccaacttttgggccctttgcctcatcacacattcagagacttagccaaaaaacatggaccatttatgtacctcaaaattggacaagttccaaccatagtagtttcatcaccagagtatgctaaagaggtcatgaaagtccatgataatgctcttgcatcaagacccaataatcttgttacgcaaatcttggcatataatggtacggacattatatttgctccatatggtcagtattggaaagaggtaaaaaagatttgtgtgcaagagcttctaaccctatctagggttaaaacttttcaacccattagagaagaagagtcgtttaatattgtaaaaaatatagcttcaaaagttggctcacctatcaatcttactcaaatgttgaaaagtttgtcttatagcatcatagctagggctgcctttggcgagaaaagaagtgatcatgatgacttcgtatatattatgaaggaaactgtgaaattgtctgcagggtttgcatttggagatgtgtttccatctttgagttttcttgattggtatactataagtaaattcaaagatttgaaactaaggtcttcaagaatagtggacagaattatcaagttacatatagatgatcaagacaaggacaatcttaagaaaagtggagaagaggaagacttggttgatgttcttttgaggtttcataaaagtgaagatcctaataacttcacattaacaaaggacaatcttaaagcaattattgctgtaagctctctctctctctctctctctctctctctctctctctctctctctctctctctctctctctctctctctatatatatatatatatatatatataatatatgggattatttcataaatacacaaaagcaacaaaaaaaattacaaaaaaacagtttcacagaattttaaatatttttacgattttttgattttatttacaaaaaatatggtctttttatatactcttgttaatttgttgttgattttttgttatctgtttattattttttattgttgttttgatattatttagatgttacttttatgtaattttcttgttgttttcgtgttgtttttatgaaaaactataaaaatataaaaaaaataattctataaacatatacgtgtaattttttttacaaaatatagtgtcttatgtaattattcctatataatatatatcctaggactggcccaagaatttcgaggggcttaattagaacaaaagtttaaaattaggccctttaaataaaacaaaatttgtgtgcattactaacttttttcagatacgttctatctttttttttttctaagacacgttctaaatgtgcattacaattctattaccaactttttttaagaaaaaaaaaattctaaaactttcaattataaactttttatttacgtatatataacaaaaaaaaaaataggtcattacataataagaaaataaataaaattgagcctcataaaatggaggccttatgcaatgattcaagctgttgcaaaatgcttatataaaaattattatcaaatttcgtgataaattaacattcttaattggttaaaaaaaaaaattcagagcatatttggagctgggagtgatacatcatcagtaactatggagttggctatggcagaaatgatgagaaatccaagagtgatgaaaaaagctcaagacgaggttagagaagtctttggcaaaaaagggtttttggatgaatcttcaatcaatgagatgacatacttaaaatcagttgtgaaagaaactttaaggttgcatcccccagctgccatgttatttccaagagaaagtagagaaaagtgtgatattaatggttatgaaattcctatgaaaactaagatacttgtaaatgcatgggcaattggaagagatcctaaatattggattgaacctgagagttttatgccagagaggtttcttgaaagctctattgattttaagggaaataattttgagtttatcccattcggcgctggaaggagaatatgtcccggaatatcatttgctctcaccagtattgagcttcctctagcatttttgctatatcatttcgattggaaacttcccaatggaatgaaacctgaagagttggacatgacagagagatttggtattacagtctgtagaaagaaggatttgtacttgattccttctaaatatgaaccaccttctatggccaaagcaatgaatataaagtag

SEQ ID NO: 167 - DNA, 2773 bp, Cannabis sativa
atggatcttcaactactttcattcccaataatcctcattactttattttttatgtttatggtagtgaaaatagttttgaaaatagctcatcatcaaacaaagaactcagtttcaaagctacccccaggaccatggaaattaccattggtgggaaatatacaccaaatctttggctcttcaccccatgtttcattcagagacttagccaagaaatatgggccattcatgtacctcaaaattggacaaattccaactctaatagtttcatcaccagagtatgttaaagagatcatgagaacccatgatgttgtttttgcatctaggcctcaaactcttgctgctcagatcatggcatataattgtactgacattatattttcttcatatggtgaacattggagacaactcagaaagatttctatgcaagagcttctaagcccgggaagagttcaaacttttcgaccggttagagaagaagagttgtgtaatcttgttgaagggatcatgacatcttcaaaagatgggtcacctatcaatgttactaaaatggttacaaaatgttcttatggcatcacatctagggctgcctttggcaagaaaagcagtgatcacgacgagttcatttcgattgttgaggaagctatcgaggcagctggaggctttgaatttgcagaagtgtttcctgctttgagatttcttgattggaaaagtcgtcctatttttgagagcatcaaactaagatcttcaagaataatggaaaatatcatcaaggagcatataaaagagaaggaaatttcatttgagaaaattggaaaggatgaagatttggttgatgttcttttgaagtttcataagaatggagatgatcttgggcggttcaccctaacaaaagacaatattaaagcagtaatctttgtaagtttttcttatcaatatcaacttcttgatattttattatagtttatataaaatctatatattttatatatatatatatatgatagaaagcaaaaaataaaataggtaaggttttatttttactagtttgtaaagcttttttgtgaaaaaagtttgatgatataaatattttagaaataattccacattgtttaggaatcattttaaatatattattgttctatacattctaaataagtttattaatcttcactttttatttatgataaaattagttttttttagagtaaatactattttggaacctgtgttttggaaaaattattaattagatcttctattttgttaaatgagaattcagaccttgtgttttttaaaattgtacaaaatagaccatgagctttatttttgtctaattaaaacttcataataacctgacttgaaggtattatgacaagaatgattatattttttttgtatttgttcgtgctaaaaattagtttcaggttgtttatattaaaaaaataacgaaaaaaattaagtttatgatctatttttctttattttaaaaaatatagggtttaaaatgtaatttaataaaataaagggtttaatctataatttttacaaaatataaaattcaaaatggtattaactttttttatcatatataatggttgaataaaatattttcattattcaatttaatcttccttaattaataataatatttttatttattttttttaatcaaaattttagtattaagaaaaaacaatatattataaaaaaaaaaaatatattattcacaatatggttagcaccgtagtaaaagaaaatcttacatgttttgtctaggagtaggtaccataaatattattatttctatttaacatttaacaaatattttatgtgagttcttagaattttcttttagtaacttctttaattaagtgtaatagggtattaaaaataatgttatacaaaatatgacaaattatatgaaataggccaaatttgttacaacacaataaatctcacattttttatatatgtttccaaaaaagaattaattaataacaatgaattgaatgttattttctgcattagaacacaattgttaaaaatgatcaaattctagtaatcactcattttctaaagttaaatttgatctataagtttttattggaaaataatgaagtgagaaatggtgacattatttcaggatatctttgtagctggaagtgaaacaacatctttatctgtagattgggctatggtagaaatgatgagatatccaaaagtgatgaaaaaggctcaagaagaggtgagaaaaattattggtacaaaagggtcagtgaatgaatcatcaatcaatgagatgaaatacttaaaattagttgttaaagaaactctaaggttgcatcctccagctcctttgttacttccaagggaaagtacagaaaaatgtgacattgatggttatgagatacctaagaaaacaagagtaatagtaaatgcttgggcaattggaagagatccaaagtattggattgaacctgagaattttatgccagagaggtttatggaaagctctattgattttaagggcaacaattttgagtacattccatttggtggtggaaggagaatatgtccaggcatgttatttggtgttattaatattgagctttcactagcatatttgttataccattttgattggaaacttcctaatggaatgaaccatgaaaatttggatatgacagaattatttggtcttacaatgagaagaaaagatgatttgtatttgattcctactatttatgaccattcttctatagcaaaatcatga

SEQ ID NO: 168 - DNA, 2692 bp, Cannabis sativa
atggatctccaactaccctctttcccagtcctcttgtcccttcttttttctctccttatggcagttaccatactcatgaaaagagctcgaaactcaaaactacctccagggccatggagacttcccttagtgggaaatctccaccagcttttattggggtattcatcatcatcctcatcttacgaggtcttcagtgacttagccaaaaaacatggacccttcatgtacctcgaaatcggacaagttccaaccgtaatagtgtcatcaccagagtacgctaaagagatcatgagaacccacgacgtcgtttttgcgtctaggccacggactcttgccgctcaaatcattggatacgattgtacggacatcgcatttgctccctatggtgattactggagacagctcagaaagatttgtatgcaagctctttttagtcccaaaagagttcaatctttggaacccattagagagaaagaggtgtttaatacgttacaacatatcattgctaattccaataaactcaattttactcaaatggtcacaaatttgtcttatagcatcgtatctcgagcagcttttggggaaaaaagcagtgatcatgatgagttcatatcgattgtggaggaagatataaaggtagctggagggtttgaatttggggagttgtttccttctttgagatttcttgattggaccagtaggcctaaatatgaaagcctcaaacagaggtcttctagaatattggaaaagatcatcaaacaacatatgattaatcagaataatgagaaaagtgaagaagagcaagacttggttgatgttcttctcaagtatcataacaaggcaaatcttgggttaacccttgacaatatcaaaggagtaatctgggtaagttcattttttttcttggtggaaaatggaaatcatatcatattattattaccacttttaaattttcaatcaattttttttttaggaataattacttaaggcactatttttaaaaaaaaaaaaattacatttttacgtttaaagaattttttattttatatatttttacggttttctataaaaacaacaaaataaaataaaaaaaaaatcgtaaaaatattcaaaattccgtgaaatcatatttttgaaatttttttatttgtgaaataatctttttttatgatattgataataaatttttgttacattgattaaattttttttaaaaaaaaaattaccaaaatacattaacatagaaaaaattttatttttgctctttgaattttttacttacaaaaatacttttttaataaaaataataaactatttttagttgttttatggtttatttatagttatattatagttgtcataaaattatttttttgttgttttataatttatttatagttgatgaaagttatcgtgattaatttctcgttatttttttatttttttactttttgatgaacaaagtgtattttgtaatttcaaaattttataaaactagttttgtaattaaaaattttatacgtaaaattataaataaaacataaaagtaatttttttaaaaaatttctcttctgttgatagttcttattaaatattaaattatttttttgatttaataataatataatataattttaatactatatctatttatacaattggataaaaactaaattataaatatttgtatttatgttcaacgtgttattaaatatttaatacattaactattaaaaaaattgatttgatacttaagtactactataaacaaatatttaatgttgttgtcgtaaaaaggtaaattgagtatataccactttttattttattttttttctattttttacgatttttttttatttttacaatttgaattgtgatctggattgctccgttagttgctacgtagattgctctgtaaattgcaccgtatatcataaaaatataaaaaaatatatatattttaaaatgtatagaagaaaaaaatatatattattctttaaataatattacttatcaaaatgaatactttttataagttgtgatgagttttttaattttgcaggacatttttgaagctggaagtgaaacaacagctgtaacagaggattgggctatggtagaattgatgagaaatccaataatgatgaaaaaggctcaagatgaggttagggaagtttttggaagaaaaggattagttgataaaacatcaatccatgagatgaaatacttaaaattaattattaaagaaactctaaggttgcatcctcctgctccttttttacttccaagggaaaatagtgaaaaatgtgaaattaatggttatgagatacctaatggaacaagagtattggtaaatgtttggggaattggaagacatgctaagtattggaatgaacctgaaagttttataccagaacggtttgatgatagctctattgacttcaaaggtaataattttgagtatattccatttggtgctggaaggagaatatgtcctggcataacatttggtgttgttagtcttgagtattctcttgctttaatgttataccactttgattggaaacttcctaatggaatgaaacctcaagatttagacatgagtgagttatttggcattgcagtaaggagaaaagatgatttgtacttaattcctacaatttatcatcagtcacctcttgcaaattaa

SEQ ID NO: 169 - DNA, 804 bp, Cannabis sativa
atgacggaacactcaccactaacccccaaaaccaagcttcatggcaaggtggcagtcgtcaccggcggagccagcggcatcggagaagccacggctcgaaagttcgctgctgatggagcacgcgccgtcgtgattgcagatatccaagacgagaaaggccaaaacgtggccgcatcaatcggcctggaacgctccacctacgtccactgcgacgtgaccgacgaggctcaagtcgcagccctcatcgactcaacggtccaaaagtacggtcaagtcgacgtgatgttcagcaacgccggggtgccttgcgagtcggatcagacgattctggatttggatctggtggcgtacgataaggtgtttgcggtgaacgcgagggggatggcggcgtgtgtgaagcacgcggcgagggcgatggtggagggtggagtgagggggagcgtgatatgcacggcgagcaatctggcgagtataggaactgagaagtacacggactacactatgtcgaagcacgccgttttggggctggtgaggtcagcgagtcttcagctgggggcgcgtggaattcgcgtgaacgcggtttcgccggggccgttgaggacgcctttgctgaaagcgtttatagataggagtgaggaggagcaggataagatgattgaggcttcgttatcgctgaagaatggaaggactccgtcggtggagaacgtggctgatgcggtgtcgtttttggcttcagatgagtctgagtttatcactggccataatcttgccgtcgacggtggttatattcatcatccaccctaa

SEQ ID NO: 170 - DNA, 2996 bp, Cannabis sativa
atggaagaagtgagcaataaacaactgctgctgaagaactatgtttccggttatccgaaagagtcggatatggtcttagccacttccaccatcaagcttaagcttccagaaggctccaatggtgttctagtaaagaacctttatttgtcatgcgatccttacatgggaccccgaatgaagaacctcaacaatggctttttcatagagcccttcaaacttggttctgttagtcacaaacataattcaacaaactttacacgtttttctgtatatatatatatatatatatatatatatatatatgagtttagcaataaattgtaataattgtttggagtgtctaacattgatttccatatatgtagcctatcactgggaatggaatttgtaaggtactaaaatctggaaatccaaacttcaaggaaggagatttggtctctggagtgacagggtgggagcaatacagtgttattgagtccacgaaatatatgtctaaaattcaaaacactgacgtgcctctgtcttactatactggattactaggtaagttttctgcttataagttaatcataatgagtttcatgtcaattgactatcaataattactcaaataaatttctagaaaaatcttattggcacggcaaaaatcaatcagatcaaatatgttgttagaatcatagaaaacgaaaaaagaagatgttagactactttgatttatttttatgcttttttctatgtttgttggatgttagtaagttattctcttatcatattctgtctaaataaggaatgcctggtatgactgcttatgctggcttcttcgaggtttgctctccgaaaaagggggaatatgtgttcatttctgcagcatcaggagcagttggtcagcttgttgggcagttcgcaaagctcttgggttgttatgttgttggaagtgctggaaggaacgaaaaggttcccaactattaactaatattaaacatatattcttatattcctcttgtctagtacaaaatgcctatgaacgtatattgggacataaatgcaattggatatttgtagtagatctacaagggaaagaaatacgtgttacctaattaactatgttgtgattatggttatcttttccttcctttttttctagttacgattttattttacactccgtacatttataccacaacatgtgcatgtggctaacatggtcttaataatttttcatttgtgtaaagtctttttttggcaagttagttgacaaaataatttttctatttatggtaagattgctttgcattcatattcgatttcttgccttataaattcggattgtagttgcccttttccttgattggaaagttgcactttcagctgaactttcctttgttgaaaacttctcaaaagacaaggaattctcttttggaaagttgccttttttagggaaactttgattattgccttttccttattaatttcgattgtatcttgataaaatcagaatatctaatctgtttttggcaggaatcaagcattaatagaggatcgaaggcgattatagcaagtttcagctttaaatccgactgtgtgcgtcaagatccgaatcgatgtttgcagatcgtattttctttggaaagtttttgtacagctgtagattcgaacttgtggttgcctctttggtttctatgttctataaatagagcttagagagcaaccattcgaattacctcttccattattcattttttgcatttatcttttgaaagaagagagtctttctttgttttgtgagagcctagttgttcatctaggttctagttgttctatttctgttcttactctatcctagaggttgtgaagaactacttgactaaacaagagattggtcttcgggagaagacttgataaagccttacttcgggaggaagtaagcacttggtcttcgggagaagacttgttgaagccttacttcgggaggaagtaagtactcacacttcaaagacgaagggagttcgggcttgaaggtgtttcaagaagtcagattcataaagtggattacaaaggattgcggcaattctttagagggagtctaaacttgtttaagtcaattgtctttgtaattttgatactttattaattgatttcattctctgggcgtggcgccgtggactaggagtgttcgtgagaacactgataccacgtataaatctcttgtgtcaagttatttatttttctgcaaatattttatattctgcttgttcagttttgctgtagcagaattgctttctgctgctgcaaacgcttacagtttttatattttcttatatacaactaacatttgcaaaaacacggtttttcaatttgaatatacctctcttatgaaacatttcataaccactacacaggttgatttgttgaagaacaaatttggctttgatgaggctttcaactacaaagaagagtctgactttgatgtagctttaaaaaggtcagtcaatgtacattggtggaattccaaatattatgttcttgagaagcactcataattcattgtaatccttattagtttaagaaatgttacaatgatagaatagagataatacatttttatatttttggacaggtattttccagaaggtatagatatatactttgataatgttgggggaaagctgctagatgctgttctacaaaacatgagaagccatgctcgaatttctgtttgtggaatgatctcacagtacaaccttgaacaaactgaaggtgtacataatctgacgaatcttgtgtggaaaagtgctcgaatggttggatttctggttgctgactattaccacctatacccaaaatttctcgaatatgttatgccttacttaaaagaaggaaaaattgtgtatgttgaagatatagctgaagggctaaagagtgccccaaaagctttggtagggctcttcaatggatgcaatgtgggaaaacaggtggttctagtctcttcggaatga

SEQ ID NO: 171 - DNA, 5593 bp, Cannabis sativa
atggaacaagagtactcctcttcatttctctcaacaaagaggtaactataattgatattcacaagtacttttttgaatatttcattaaaattatttatctaaaatatgttgacttttggtgttcagatatgctgttgttacaggtggaaacaaggggatcgggtttgaaatatgcagacaattagcttcaaatggcatcaaggtcgtgttaactgccagagatgaaaagaggggtgttgaagctgttgagaaactgatcaaagaatcaaatttcactagtgaagacaatgtcgtttttcacaggcttgatgtcgttgaccctgacaccattgcttctttggcagattacatcaaatcccacttcgggaagcttgacattttggtacgtacctacgtttgatcatattcaaaatatcaagataattatatacgaatatgcagtgtatatcaaagatataatttacataagtttttccttaataatttcagtataagatttaaaccacatatatactatatactaataaatatttgttaatgaaggaaaagtaattattaatacctatatattatactttatgcagataaataatgcaggaattgctgggggtacacttgattcttatggttatgcacaagccactgagcttgctggtggtaattgggttagtatttttattttatttttcagttagtaatttactgaggaggttcaaataaattatatgtgatcagttctcagtagtttattattactccacatcgatataaagttcttttagcattcaatattcttatactttcgtttttttccatggagaacattgtcccacgtggattaaatgtaaaagtattgagccatatataagaatatgggctactccactcattgccaattggttttaagatagaaccttatcctaagtgcaaagacggctgagatccaaatcaaacaaaaatttgactaatttaatgattagtgatttttttttttcacaagaaaattttctctgttacagccagagaacggcaattggaatgagataatgacccagaactatgaatcggctgaagaatgcctgaaaacaaattattatggagccaaagcaacgattgaagcacttgttccactcctccaattgtctgattcaccaagaatcgtcaatgtttcatcctctcttggtctcttacaagtacgtgtataaatatcatatttatataattataataactgcatatatagttttcaaaagtctttgttcatataattagtttttcttaattaatttgtaatgacagtacataccgaatgaatgggccaaaaacatgctgagcgatgttgataagctaagagaagagcaaatagatgaggtagtgagtgagtttctgaatgatttcaaacaaggtaagttagaagccaagaagtggcctacagagatttcggggtacaaagtttcgaaagcttcgctgaacgcgtacacaaggattttggcgaagaaataccctcaaatgtgcgttaactgtgtgtgccctggctatgtcaaaactgatatcacttgcaatactgggcagttggttgctgccgaaggtgctgaaagtcccgtgatgctagccttgttgcccctcgccaagccttccggcttcttcttctccaggaagcaactctcccctttctgagatctcatcatcaatatgttgatgaatttaattattatgttgaaattttcattattacaaattataaaagcttctacttgggatcggttacaagtgctcaactatttatatctatacatgcatgacggaatatataatactaataattcatcactatcatttacttttcttatgtatatatacgtttggataaattgtgggataaattacataaatatatgtatatatatgtttgcataagcattcaatgttagtaaaaaaatgtaatttccttcagttttagtatgctctatttgtttcggttttgaggattttttatttatttatttatttttttttcataatactgtaattattttaagaacacctataactataaaattatttaccatatatataagaaaaattcgactaaaaaatgcttctaaaaaccagatatacaattatatttatagtagaacaacccttatatgataagttcttttatatatcagtaatgttacacatttgaaatttgatgaagacatggaatatttagtaccaaaactataagctatacgctatggatagaaattgtttgtccctatttcctcccggaccttcactcacatgtattattgatccaacctctaaatgcgtataactaagttcaatatattttttcttaaaataaaatctctatatttaattttatactttaatatacaaaatccaatattaaactaaaatagtttacacactatttcagcgtatgatattcggaatcaacagaaagaaggtttcttacgttaattaataatcttgaggaacgacttgcttagctagaagaacaaccttctatatttaatttaattcccttaaataaattattaattatataataaaaaaattactaataatcaatagtgtgatagtaatgtcataacgtaaaacgactccgaccatttctttcaatgaaaaaattaagagagagtttggcctaaaacttttgtttttcaattttaaaactaaaaattatttttttagtatttgatattgttttcaaaaacacaatttaaaaaaaaaaaaagatatatattaaattttaaagaagctaaaacaattctaaaattttaaagaagctaaaattataaacatgtccatttggtttggtacgctccaacaattctctaccattagttatcattaggaataaacactgctcaaaaaagaaagaaagaaagaaaaagaaatgattaattctttcataattttcagtggctgcaaactaaatcaaaagctaagacaatttattacaagatagcggaagaacaaactcgatagctacatttatcagttttcttttaattggacttttcatctggaagttacattgtggttaacagtttttactagcaaataaacaagtgaaattcaatactaatcttaatctcagtggcgtttagttgagaggaatgaaaatatagtaataagaatggaaatgagaattggaatagcaatggaataaaatttaaaatgaataaaaaaattgataaaaaaaattattaatttttttcaaatcttgcattagaatgatctttctttttatttcaaaatgaaatagtcattctaccaaaatgataaaaaggtcattccatcggaatggtattccaatggttttaaatgcaaccaaacaaaagaatgaaatgaaaattgttttctttccattccattccatttcattgcctccaaccaaacgccatctaagatctcaatactccaaaatatccatctcacaagagtcacaacaaaacagatacaataatcaggtacacatcatccacttgtctaagaaatagtttatcctctgatcaagtgactctttgtactcaaaatctaaaattgactaactccacaaaattataacttgtagttggcagggaccaaataaatgtgcaactaagccgaaaggaaaacacttggccttcaaattggccagagaaaaaagattttgatcaatcaagttttagtgctttatacgaggctaaattttaaagccattcattcatcactaaacgaaccaaaacatttttattacaaacccaagtttcatcaacaatgtctggagcttcagaaaggttaataacatttggtgttctgcaccaacatataatataccaacaatttattttagcgtctatgctttttgtctacgtttttctttttttaggttcttttgatgaataaatatttgaatgcatatgtatatttgcagatatgcaattgtaacaggggcaaataaggggattggactagagatagtgagacaattggccttgaatggagtcaatgtggtcttaacagcaagagatgagaaaaggggtcttgaagctttggagaaactcaaagagaaagagaaaaacctctctcacaaagtgctgtttcaccagctcgacgtggctgatccagctagcattgttgctatggttgatttcattaaaacacatttcggcaaacttgatattttggtaaatattaaatttcactttcgaaagagtttttctataatttctggtttttattaatcttttatttgaacaaattttaaatttgattgatttaaacgtgcatttaaggatttaaaatggttcagaatgagaacaaattaacaatgattcttttataagaagggtaatttcgttttatttttaattaataattttataattttacggtctaaaattattattttacgaaaaatattgtaaggttttgaaatttaaaatatgcacgtagctaaaaaaaacaactaaaaataataaaaatcagcttcacaaaataaattataaaacaataaaaaataactaaaaaaataatctcacgataattataatataattataaaacaataaaaaaaatcatttattatttttactttggtacaatacaacaaatgatgaaatgttaagagctctgcaggtgaacaatgctggcgttggtggaacagaagaagacatgcatgcaattgtagcttctttaaatgctaaggtaagatattgaattttttaaataggtgatttactgtttgttatgatccttttgatgaactacacactatctttatttatctattgttgtttggttaataatatgtttgaagagttataatcatattataatattataaaggcttctagtattattttgaaattattaaaaaatatagtttagatcataaaatatatactcgcgtatttcttttaatgcagaccccaaaagaaggtgatattaagaaaactactcaaacttatgagtcagccaaagaatgcatgcaaataaactattatggtgctaaaaaaactgctgaagagcttattccccttctccagttatctgattcaccacgaattgttaatgtttcttctaccatgggaaagctacaggtatataatgcaagttatatataagatttaaagagaattccatattagacatctctgtctgttaaagtaaattgttatagcctaaacttattttctttgttatatgttgtacttagaatatatcaaatgactgggctaaaggtgttcttagtgatgctgagagtctcacagaggataaaattgatgaagtgataagagagtttctgaaagatttcaaagaaggttcattggaaaccaaaggctggcctagttttttgtccccatatactgtctcaaaagcagcccttactgccttcacaagggtactagcaaagaagcaccccaactttatcatcaactgtgtatgccctggatttgtgaagacagagataaacttcaacaccggtattttacagcctgaagaaggcgctgcgagtccagtaaggttagcattgcttccaaatgatgcaccttcaggcctcttctttgatcggtcacaggtttcgtctttttga

SEQ ID NO: 172 - DNA, 5588 bp, Cannabis sativa
atgttattattattccattacaatatgtccttcttagacttaaccagtaataatctctcttcctttaccattttattagcaaccttattattctttgtgctgctatataaatcatggttctctattaaaacaaattctccaccatcgcctccaaagcttccaataattggaaacctccaccagctcgggttgtaccctcaccgaacgctgcaggcctggagcaggcgctatggccccgtcatgcagctccggctaggcagcgtgccggttctcgtcatctcctctgccaccgccgctcgtgagattatgaagactcacgacattgccttttccaaccgacccaagtcctgtgccctcgagaagctcctctacaactacagagacattgcttcggcaccttatggcgagtactggaggcagataaagagcgtttccgtgcttcatctgttgaataataaaagggttcagtcctatagagctgtaagggaagaggagaccaagctcatggttgagaagattcgaaagtcttgtgggactggggtgaatttgagcgagttgtttgtaaggctaaccaacgacgtcgtttgtagggtggccttggggagaaagtacggtgaagaaagtggtgggaagaggtttaaggagcttctgggggagtttacggagctacttgggggtttctatgtaagagactattttcctaagcttggttggttgagtcgtgtgagtggtttggatggtagaatggataaagtggctaaggagttcgatgagtttctggaaggtgttcttcatgaccatatgaatacaaataagaatgttgatgatgaacagaaagattttgtggatattttgctttggattcagagggaaaactcgcttggattttctattgataggacttccataaaggctctcatattggtaattattttttgtccttctttttcgtcacaatcacatatattttgtgccttttttttacgtactaaattttatactatttttagggtagtacggtttatattactttcatatatattgatagttttgttatttttcttttcctttaaaactggttttttttctttcaaaaaaaaaaaaaactggttttttttttttgttttatatttttcatatatttttttttgaaatcaaagcgttatataaataagattagacctcgcggtcattacaaatgatagttctaggtatcgaggatagctccacgaaacctgtaatgttctaggtatcgcggtcatatttttttttaggtgttctatagttgtgttatagttgtttttatgtatttttttttattgtagaattattttttagttgtttttgttatggggtgtatatttttagtttatttttgatgtttttttttgttgcatgtatatatgtgcatttattttattatttttgtgttgtgttttagttatttttaagtggttttcaaaatattttcttgttgtacacttatttttttatgtgtatttgttatggtgtctatttttattttattcctatttttttgttgtatgcgtgttattttgtagatgtagatatatatttagttttttttaacacgttttttttattttaaaaaatacaatgataagttttttttttgggtaaattgacacaacgtgcactagtaaatattgacatattatctagttattttttttattatatattactcattaaattttatacccaattattttaaaattattataagattttattatttttattatgattgtaaccattcatttagtttctaaaaaataaattgttattttagttgtcaccaacttaaaaagaaagagaaaaaaaagagttgaaaatatgaagttataacaaaaaaaattaaaaaaaatatatagtagtacaaaaaaaaaaaaaataatcaagttaccaaagattaagtaaaaaaataacatcataatacaaaaataagttgaggagttgatattgttttacattttgtgtaaagaggtggtgttttgttatttttctattgctttataactctctttttattattttattgttatttatgtattttataggtatatttttattttactaaaacatagtatttttgtgattttaaaactttaaggtaatatttttgaaaactaaatacagtaaaaatataataaaaatgtataacaattaaaatataaaaataaaaaaaagataattttgtaaaaaaaatcctatatttttgtcagagtcatacttttatatcatatacattggttccaatttattataattattattattttatatcataaattcgtactatccaagttattttttaagtttcttttagtaaatatttatatttctttaatataatttataataactatataacatatataaaggaattattttataaatacatcaaaataacaaaaaaaaaacttacaaaaatacggttatacgaaattttaaatatttttacgatttttataattttatttacggaaaataattttattaggtaggcattcgatctaatctaacttttttctcatctgatccaatccaatcagtaattggatttgaaaaattaccattcgatccaatctaattagatccaaaatccaatcaaatccaatccaattactaaggattgaagcagtttttttaattggatatctaattacacacttaaattttaaaattaatttaaaaatatgaagaaaaatacataaaaactaagtcacacgttttattcaagtttaatacttcataaatacactatccttaaaagtgtaatgtaacaaaaagttttaaataattaaaacaacaacctttttaagtaataagatagaacaaaaatgcacactacaagaaatatcacttttgccagcacatttttgtgctggcaaaagttagtattgcgctggtaaaatagaatttacctatgatgtgttggcaaaagggggttggcaaatcaatgttggtattagaacttttgccagcataaaatgaaaagcgctggcaaaaaaaacttttcccatcgcgtaaatgtgctggtaaaagttagattttagccactgcaaatgtacgctggtaaaactttgatctttttgccagcgcagtttgtgaaatgcgctggtaaaagttacttttaccagcgcagtagcgaactgtgctggtaaaagtaacatttcttgtagtggcatcatgaaaataaatacacaaaacaatcaagttttacaaattcaacacacaaaaaaatctaataaaaatataattaatgtatattatattttttattatataaatatttttttaacatatataaatataattggatttgatcgatttttaattatattttaagattgacatccaataaccgatccaatgcaattagaatccaacttttagcatccaatacaattgtaattggatatccaactttttataattagattggattgaatgttcggctcaattggattgaattggatgatgctcatcatccctagaaaatatagtatttttatgttgtattatttttacttttttgttatttttttattatttgtatgttattttttttgttgttattttgatattgtttggatgttattttcttattacttatatgtaattttttggtggttttggtgttgtttttataaacggtaaaaatataaaaaaaatatatttcaacataaaaatgtatttttttttacaaaaaaaaattgtattttatataattatctcatatataaataagcaatattatagtagtgttatttttgtgattatggtatttgtaaatattataatctcatttttttttattcgttagcttacattataattgaatcttttagttctgataaaaaaaaaagaaaaatctcaataatttgagatactagacataaagttcataataattgataaaatttctttatatactagatgagagttacgtggcgagccacgtaaatattagttttatataagttttagtggtttttgtttaagaatccagtaactgagcaacggcaacaacaatggtagataaatctatttaagttttttatatttgtaaagattataaatctaaacttttaattttcttgatttgagattttgaattgttctgatttatttgtttatgaatttattgaaatacttgaatatttattggttttgattttgaattgttctgatgtattcatacttgaatatttatattaatgaaattagtctgtagctttatggatttagaaaaaaaaagatattttttaatatagagtttaaattttatgttgatgattattaatgaaattattctgtaactttatgtttctagaaaaaaaaatatattattttatatggtttgttagagagatatgtggctaagatgattttttttttcaatttaaaaaaagattgtttaattttttaattttttttaatttaaaaaaagattgtttaattttttgggtttaattattgggtttatttgttaacgggagatcaaacctattaacatcattaaatttaacagaatattcttttatttttaaggtatattctgttaaaccaagaaatgtcgttagatagacacttttaatatataaagatatatatattttatattttaggagcatggttaaatattggttttaataactaataatataccattctagaattttcaataatattttttattttttttagttaaaatagctaaaaaaaataaaatagagatatatagttatttttattattgtataatttaaatttgtcaaatataaattaattttataaaataataagaaagtagtagtgttttttattaaaacactattaaaaaatttagcattagggcataaatttttgattaaaaatgtctctatatatgtttgtaggacacatttgcagcgggaacagacacaacctatacagtcctagaatgggcaatgactgagctcataagacatccaaacgccatgaaaaagcttcaaaacgagatcagaacaacaatccttaataagaagataactaacattgccatgccagaagaatatattaatagtgttacagaagacgacctagaaaaaatgccatacttgaaggcagttttcaaagaaactctccgtctgcatccaccaatccctttaatcgttcctcgactcacaatacaagacatgaaaataagtggatacgacgtcgcttcaggcacccaagtattcatcaatgcatgggcaatcgggagagatccgaccttgtgggaagaggaaccagacaagtttgaacctgagaggtttttgctgaagaacgctgcaattgattacaaaggacatgacttcgagttgatccctttcggggccgggaggcgaggctgccctgggattgtatttgccatggctgttaacgagcttgctttggctagtgtggtctataagtttgattgggcgttgttgagtagtggagaagaggatttggattattatcatatgactgaaaccacaggtttgactacgcatagaaagtttcctcttatggctgtgccaactgaatattatcaatga

SEQ ID NO: 173 - DNA, 4545 bp, Cannabis sativa
atgtctccttgcgaagctacaattgatgaaaaacgccctaatatgccaaagtttactccaaccatttggggtgattatttcatgtctcatgcttcaagtcatcactcatctcttatggtatgttttttttttccttaaattttttacataatagaccaaaagttttttaaaaaaaattacaaaatatgttaaacacataagggtttttttttttttttaaaaaaaaaaaaaactgttatatttacaaatctatgtactttagtaaacataataaattgttttttttttttatgttttataatttattaatttataaatgtattatatagttgtcatgatgttatttttctgattgtttttagttataatttatttatagttatcgtgcatgttgatttctattgttaatttttaattattttcttattttttgttaaaaaaaagcatatatatatatattttaattttaaaactttaaaaacgtactactgtaaataaaaatcttttgatcgtaaaattgtaaataaaacataaaaaataatatttttgatttttttttcccttaatgcatgtcttatttttagataattaatacataaatttaaaatatatatatagtctccattattgatttatatcttcttcaactgtgtttgttcaggaaactatggagaataataacaaagagagttatgagaagattattgagatgaaggaacaagtgaagaataaattacttcatggtcttcatcctttggaaaaccctttggagacacttgaatatattgatgatattcaacgattggggttgtcttattattttgaaaatgaaattgaacaaaatttggagcaatttcataataattatcaaaatctaattgattttggtgataataacctttatgctgatgctctttgctttcggttgcttaggcaacaaggttataatattgcatgtggtacgtatatatatatataatacatgcaccaatatataaaaatagactttatatatacatatatgtattgcataatacaatttatagtatatttgaatataattaacatgaaattatacctaaaagatgcttcatttcatgacataattaatattaagtattataatttataatatatcagtaactattttataaggtgtcactgggtcggtcctaagctaagatgggctaggcccgcacttaattagggcccacccattttagggacccaaataaaaaaaactttttaaaaaaacgtaaatagtagtataagtactcaaattttgagtttgtaagtagcataaattcaatgattttttttagtggtataagtacccaatgtttataaaactttaattttcctccagtttcataaatatagactctgttattgtcttaaatagggcacatataagacccatattctaaattatttggtctggacagaaatatgttgtatcagttacttttaaatcttcttttaataaatttaaaacggagtttgtactaatgaaaatagagaaaaattacagttaaacattagatacttatgtcactaaaaaaattattgaatttatgcctattacaaactcaaaactttaagtacttacgctgctatttatcctttaaaaaaatatatatttctttaataatttttaaaatatcatttatctttatatagtaagggttgatttttttttttttttttttttgcttatggtccatttcaattcaagttcgaccctgagcatcacctcacagtaatattatcactgatgtagtcttataacaatgctctattcttttcttatatgtttattattattattattgctgattataaatttgtttggtggcttgggtggattaattaacacagacatattcgacaagtacaagaatgaaaatgaaaaatttaaagaatcaatttcgagtgacattcgaggaatgttgaacttgtatgaagctgcacaaatgagagttcatggagagaaaatactagacgaagcacttatctttacaactactcatcttgaatcctcagttaaaacatgtcaattgagctctccttatctagacctagtgaaacatgccctaatgcaccctattcgaaagagcttacaaagaagagaggcaagactttacatatcactttatcatcaactaccttctcatgaggagattcttttaatacttgctaaactagatttcaacctgcttcaaaaactacatcaaaaggaactaagttacataacgaggttagtgctttatgaactcatgattaactaagaagcacatatacattttaattttcatcattcatcattcatcattcatcattgcatgacttcatatataatgtagttgcagaagacttacgaattttaaaaaaaaaatggataatttaagatgttcaaatcataatttatgtgtacatatatcgtaaaacaatattatacagatatatatagataaatattatttttggagtttgtattttgcaaaagttactgattactttttgttttgttaaatgacaatatagtttctatatttttttaaaatagtatacaaaatattctctaagctccatttttgtgaaatataacttaataataatctgacttcgaggtgttatgatcagaccgattattatatatatatattttttttgtatctgttcatgttagaaattagcttcagattgttatattataaaaaaaaaaaattaatgaaaattgagctaagagaattatttggtaccatttcagagatgcggagtccaatttattatttaacaaaataaaaaaatcttatcagtaatttttataacacttctaaaatattatttgtcctagatatatatcatgaaatttattaatgattgtgattatataattcatggagtatatactatctataaagttctattttttttttcaattaaataaaccctattatattatgaataatgtttgactttatgaccattaattattaaggtggtggaaggagtttgattacaaaagtaagcattcatttataaaagacagaatagtggagtgctatttctgggtttatggagtgttttttgaggcagaaacttcccaaatcagactaataatcaccaaattaattgctattctcacaataattgatgatgcttatgatagctttggtacacttgaagaactagagccttttactcaagcaatagaaaggtataaatatatatatatatatatattgacttatataaattaatttgacatatatatagctattaattagtttatatatttcttatgattaggtgggatatatgtgccatagatactctgcctgagtacatgaaaatattttacatgaaacttttggagatctacaatgaaattgaacaattttctaaggaaagatcatactgccctagctatgctaagaaaggggtaaagcacttattattattatataaaagattagttaatttaattcacaacatttatagcaaatcattaattgattttttttttcttttttcaggtgcaatctctaattagagcttattttaaggaagccaaatggttacacacaaaatatataccaacattagaagaatatatgccagttgggattgatagtgcaggatcttttatgctcatttcaatggtttttattggaatgggagatattgttacaaaacattctatggattggatattttctaatcctcaacctaaaattatacaaactatggcaatagttggaagagttatgaatgacattggctaccataaggtaaataatttaaacataagtacacatatacattaaatcatattatctattatttataaatatatatttttattaattatggatattactatagtattgatgcttttaattacctatttattttttaatattttcagtgaagtgataaagttgtaatttaccttcaatggaaacctcttacaaatttttagaaaattttgaataatttataattttgaaattataattcaaacaacttgttgcatgcatatgcgcacgcattggtttttgaatcacaatttcgattgacaccctaaattattttgatttttctaatagaatttataagaacacttttgtgattatactatacactattatgtaagaaaattaaaatttatctatgtaccaaaatgttattattgctcaattttttatcaactattattattaatatatacatatattgtagtcggagcgaaagaaatcatcaggagaaattgtggcttcaactgtggagtgttacatgaaacaatatggcgtgactggtgaagaagctatagagaaacttagccaacaagttaaagattcatggaaagatctcaatgaagatcttctcaatccaatcactatccctaggccactcttaatgcaagttctaaagcttgtacgagtgaaccatgagatttatagagaaggagatggctttacacaacccactttgctcaagaatttgattcattctctcatcatcaatccaattgacttttga

SEQ ID NO: 174 - DNA, 5545 bp, Cannabis sativa
atggcgaccgctattttctccaaccccaagttctcccccacaatcaccaccacctcctccaaaaaccattaccactaccaacgccgtacacatttactactccacgacaaagtccaagcttttcaagccgcctctcttaaactcaacccaaatcctcattacaagaaaccccagatcgtttcctgccagagctccggtagcgagtcaccggacacagagaaggtgcggcggccggagtacattccgaaccgtatctccgatccaaactatgtacgtatcttcgacactactctccgagacggtgagcagtcccctggggccgccctgacgtcaaaggagaagctggacattgccagacagctttccaagctcggcgttgacataatcgaggctggattccccgccgcctcgaaagatgacttcgaggccgtcaagattattgccaaagaggtcggtaacgccgttgacgccgacggctatgttcccgttatctgtggtctgtcgaggtgtaatgagaacgatattaggagggcttgggaggcggtcaagtacgccaaaaggcctaggattcatactttcattgctacaagtccaattcacatggagtacaagttgagaaagagtaaggagcaggtgattgagatcgctaggaacatggtgaagtttgctcggagtttggggtgtgatgatgttgagtttagccctgaagatgctggcaggtttgcattttgatgaatttgatgacattggccccgttcgggtcagcatttttagctttttacaaagaaagaactgaccaaaaaaacacaaaaaattcgaaagatttttcacaaaactttttacttattattttatgtttatagtcattatcttcttatgagtgacagaagaagaagaagaagaagctaatagggtctacctttctgcaccaggtctgagagggaattcttgtatcagattttgggagaagttataaaggctggagcaacaactctaaacatacctgacactgttggttacaacgtgccaaaagaatttggagaattgattgctgacattaaagccaatacccctggaattgagaatgttgtcatttctacacactgtcaaaatgatcttggactttctactgcaaacacgatatcggtatgccaatgccttggtcctgactgatatcatttgattttagatatgatgtgaactcctctcatttgattgttgttcagggggcatgcgcaggtgctagacaattagaagtaacaatcaacggcattggtgaaagagccgggaatgcatctctggaggaggtgattgtttctttttgatcttcaacatgggaaaatgtaatcatattgtgtttgaattgagttggccaagcttctctgacttaataatttgtataccatgtatgaaacgttgagtctccttccatttcaaaatattaaggaaccacaacaaatctaatctgctaatctacttttatctttaaacgaatggtcatttcttacccttataaaagtagtccatttatcatagtcgtcagctaacagaatttaataacatttgattcacgagcaagggaataaaatcatagactcttagcatccttttgcttggcatatgaaaaatgcttcagttcactggtatatcaattagcattaaccattagctctataaattttacatggaattgaactacctgattcaagacaaatttttttatgtcaattttcttgcatgcacacaccctaggtacgttactcactatccaagtagctgatatacaaccagtatcatcatcttgcaaccagatttgtatttatggtttttcatctctattcaaattgctgatagccgatttagatcatttggcatattgggtaccaagtaactgatacaatacacccaagaagggcagctcaaatgggaaggcacttaccatttgaattcgttgtaggaacttacatagtaattgtgatttgttcccataagatctgaggtttgaattcgttgtaggcacttacatagtacttgctttggtttcgtgatccccaactattgtagggatagttggaaagttatagtttttgttttattttctttcaaaaacataccaagtatctgacacccttagcagacttcaatctaatatccataccaaatactgttattcacttggtgctttacctactgcaagtttgtctattgtgattgattgaagtgcaagcaaaatagctttctaactttactttctcttgatcttggcactgcttcattcctgtaaaatcttggtttttgcaagtgaaatgcttaatgtgatatcctaatcctttgcatcctctgcaagggagcaactttcaatgtcattcctttcaaaaattcataaattcttttttgagcaatcctattgcttagatatttaaataactatttttgttggttatgttttgggtcctttttttcatcttatttgatataatggtttcgcggttcttttctttgttaattcttcaggttgtaatggccataaaatgccgtggagatcaacaactgggaggactttatactggaatcaacacaagacacatctcaatgacaagcataatggtatgctctctcagcttactttcagaacttttgtcagatttttacgtgtgatttttgatcgtctgtacttgtgaataacctttaggttgaggaatacacagggttgcaagtacagccacataaggctattgttggagccaatgcttttgcacatgaaagcggtatccatcaggttggtattctgaacactttgtgttacaatgacttgctactattttacagttcatactaccattgttatcaaaactaagattcttccctccttaaaaagctgaagtatccaagataaagcgtcccgctaatatgagttttaagtatttttttttctttctttcttttctgttgtttaatatttaaaaaaattgggtagttgttattagtttaattaaaaggaaggagccatttttactgttgaaaggattagttttttagaaattccaacctaagtttgtcagtgaagttcctctagtctcttttcttttatattgtagtgacatgttaagattttcagtttaagatgcaatgctgagaagctatgttctgtaggatggaatgcttaagcacaaaggtacatatgaaatcatatccccagaagatatagggcttgaacgaagcaatgaagctggtatagtccttggaaaactcaggtacaaatagtatcaatacgtatatatttatatatatatatatatgtatatatactgataggaaacaaaattgtatattattaaagatgatggaaatgatatcaaatgtaatataccttgtttggttaattctggtttacatacccaagcataaccatattttttcttctttatattactgttagtcaattggtggaataaaattatggacataccacaagctccattatctgtataattttcagttatatacaagtaatttaattatattacaaaaaaaatgtgcaaaaaaacataatcacacaattctatacaattttataaatttttactaataatcatcatattcacattatataatagaaataaacataaatatttacgatttatagattgtatagaaaaataaaattatgtttatgcatccaatatagaatgtataattaaatgcgaatcagttattttgtaataaaattatataatgtatgcaaagctataaatttccctatcttcaaactcatatttttgctatcgcgtgctagtttttctgtttgtgcttcctttttattaatctttcttaatcaaactcaatttcttctggtaatgtttctttttgtttttggtacagtggtcgccatgcattgaaacaacaacttgaggaggtatgatatgatctcatatctttgcagtctgcttaccttactcctacctatatgggattagtatttagtattctttttctgctcttgttatagcttggttatgagcttgaggatgagcaacttgagagtatattctggcgcttcaaatctgtggctgaacttaagaaggtaggtttaaatgggtaatgttttctgtatttattatttaatttatactgctgtaaatttcaactatgtgcacaaaagtatttctgttgtttttgctccttgctttattacatccttacttgtctcagtagtgttgtttggttgtaatgagttctggatctgaatgggaagagaacccattgtttaatgtatccataacactgctctgtgcattattttgtatttaaacttgcatggttttattcttcttggccaatttaaaaagtgactagacttgccaccatcagctatgctattttgtgtgttttcttggatttttaattgttgcctcctattatttattcaaaatctcagaggataactgatgctgacctcagagcactagtttcggatgaagtttttcaaccagaagtcatctggaagttcgttgatttgcaggtgaatctagacacaactttgctttttcttatcatctaattttataagttttaaagcgttcaaaaaaaaaaaaaatataagttttaaaaggaaaattctcaccaaatgatgtgaacctagcacaggttacatgtggaactcttggtctttcaactgcaaccgtcaaacttattggttcagatgggaaagagcatgttgcttgttcagtaggaactggtccagtggactcggcttacaaagctgttgatctgattgtgaaggtttgaaagagaaaataaatgataaatcttttctgtattattttgtgcatatgattgctgcaagggtgtgtctaaatttgataccgacctattgtactattttgactgacgttaagtggatgttcttgaatgttgaggctgctttacgaagctaagtctttctattgcaggacaaggacattgttggtagtatgtaattcattgttagaatcagtaagcatgattttggttgaagtggacaggaaattcattgatatgggctgatgatttgatacctcaaaagtcaattgtttatttttcctatgttaaaaatattaaatttgtttttcttctatatatctgtgcacaccaagttttttgatggtgccttgtatacctgtgttctgtgcaggaaccagtagcactcctggagtattcaatgaatgctgttactgaaggtatagatgcaattgcaaccacccgtgtgctaatccgagaggaaacgagcgacttgtcaggtcatggttcaactgttgaacgagttactcggacatttaggtatttgcatgtttagtggttgtttctcttttagtggcacaattgttcttgtgtagacgtgtgaaatgaattctcttcttcttcttttgccagtgggaacgggtcaggaatggatattgtggtttcaagtgtaaaggcttacattggtgcgataaacaagatgttaggtttcaaagataggaccgttgtgaattcttctgaagagagaatacccatatctgcataa

SEQ ID NO: 175 - DNA, 1768 bp, Cannabis sativa
atggggaggcactcttgttgttacaagcagaaactgagaaaagggttgtggtcaccagaagaagatgagaaacttcttaattatataaccaagcatggacatggctgctggagctctgtccctaagctagctggtattaattctactattactactatcaatgctaataatttctgtatgtttgcatcaaaattagttacatatttattcatcattaattttttatgacaggtcttcagagatgtggaaaaagttgcaggctaaggtggataaattatttgaggcctgatttgaaaagaggcccattttcacaacaagaggagaatttgataattgaacttcatgcagttcttggcaacaggtaattaattacttgtttcttgagaaaaaagaagaatgacattaattttgagttgaaattcatttctgggtacttatgtaaataattttgtgcaaatttttcagatggtcacagattgcagctcagttaccaggaagaacagataatgagattaaaaacttatggaattcttgcattaagaagaaactgaggcaaaaagggattgacccaaatactcataagccattatctgaggtagaaaatgacattggtaataaattggagaacaagggtaacaaagctgcaaccaataacaacaacaatgagaatattaataattctactgttagagcttcttcattaggaaacttatccaatgatcatcatcatcatcatcatcatcatctgaatctagctgaccagtcacaaccatcaatggcggccatcaatcgttacccactattggaagtctcatcctcaactccgccgacacaagaattcttcatagaaaaatcaacagataccagatcatcaccatcaatatcatcatcatcaccttgtgatttttctacctacttctctttccactcaaacaattacaatacgacgtcgtccgctgctgcagctgctgctgtttctcatcatcaagatcaaaacaacaacaacaacatggccagtttctgcttcaacattaatcaaaattcaactagacctccacaacaccatcatcataatcagatgattagtaatctcatccagccactacaacaacaagtatcaccttcatcaacaacaacagcatcatcatcatcaccaccctccaatattccacgtgtaaagccctccataagtctccccttattatctgatcaccaaaacaacagtaatagcactactactactactacaacaactactggagccgtacaaaattgggaaactagtactttcagcaacaacggaagtagtagtagtagctgcaatatcgaattacaaggtaataataataacaacaacaacaacttctttgatcacaacactaattccaccgccgcggccgccgccgccgccgctcctaataacttctcgtggggattagtcaatgaaagtactgttggtagcataaaatctgatgacccagaagacataaaatggtctgaatatctccatagcccttttcttcttggtggaggaattagtaatactaataatcaaaattcttcttcttcttcacatcttcaacccattttgtacagtaacattgtgaaaccagaatcacactttagtaatactactactgctacaggatcaaaccccacgtggcatcatcagaacgatcatcatcagctacaagcggcttcatcagaaataatgtacactaataaagatctacagagacttgctgtagcttttggacagaccctttag

SEQ ID NO: 176 - DNA, 1113 bp, Cannabis sativa; identical to SEQ ID NO: 161

SEQ ID NO: 177 - DNA, 2469 bp, Cannabis sativa
atgccttctctcttctcccaatcactacttctccctttctctcaaaacactaatactctctcccttttccatcaaccaaaacttcttcctccaggtgcttcgctattggaagctaaagacaaacaagttaactttgatcgtgatattcgctcaaaatgcagcgctatatcaaaaccccgcactcacgacgtgtttcaaagtggtggtctgccagttataaagtggcacgagattgtggaggatgacatagatggagaagaagaagatactaagtggacaagatcgaatgagatcgaggaacgtgtcgcttcaatcaaatcaatgttggagagtatggatgagggagagataagcatttcagcgtacgacacagcatgggtagcccttgtggaagatattcatgggagtggcttacctcaattcccatcgagtctccaatggatcgccacacatcagctctccgacggttcttggggcgatgctgacattttctccgcacacgatcgcctcatcaacactttggcttgtgttgttgctttgaaatcttggaacctttatcccgaaaaatgtcaaaaaggtatggcctttttcaatgcaaatataagtaagcttgagagggagaatccggaacacatgcctattggtttcgaagtggctttcccttctttacttgaaatagctcgaaaattaaaccttgaagtgcctgaggattctcctgtgttaaaagtcatatatgctaggagagatttcaagctcacaaggattccgagggacataatgcacacagtgcccacgacgctactccatagcttggaaggaatggtaggtctggactgggaaaagcttttgaaactgcagtcccaagatgggtcattcttgttctcaccatcctcaactgcttttgcactcatggagaccaaagaccgaaattgcttgcaatatttaactaaagcggtccaaaggttcaacgggggtgtcccaaatgtttacccggttgacttgttcgagcacctttgggttgcggatcggttgcagcgcttgggaatatcaagattctttgagccacaaattgaggaatgtatcgattatgtattcagaaattggactgagaaaggaattggctgggcaagaaattccaaggttgaagatattgacgataccgcaatgggtttcagactactaagattgcatggtcacaaagtttctgccgatgtgttccaacactttaagaaaggtgacgattttttctgctttcggggccagtcaactcaagcagtgactgggatgtataacctttatagagcttctcagttggttttccctggagaaaaaattcttgaagatgccatggaattctcatcgaaatttctcagaaaaaaacaggcgtccaatgaattgctagataaatggatcataacaaaggacttacctggtgaggtgggtttcgcattggaggttccatggaatgcaaacttacctcgagtagagaccagattctacattgaacagtatggtggacaaaatgatgtttggattggcaagacactctacagaatgcgaaaagttaacaatgacgaatatctggagttagcaaaacttgattacaacatttgccaagctttgcattcgattgagtggcacaatttgctaaaatggtaccgagattgtaagttggaaaattatggagtgagcagaaggaacctcctcttggcctattttcttgctgcggccagtattttcgaaccggatagggccgatgagcggcttgcatgggctaaaacggcagcactgatgcaggccatccaatctcatttcgatgaccagaaagcttcttcggagcatcgtatagcttttgtctctgcttttaaaaggagttgtaacatgccatcgtatttgattacaagggtgtcgaacataagtgatacagatcatggccttcttagaacgttgatgacgactctcagccacctctctttggacacaatgatgctgtatggtcgggacatcacccaccatttacgtcaagcttgggaaaagtggctggtgaagtggcaagagggtggtgatggacattacgaagaagaagcagaattattgatccaaacaataaaccttagctcaggccgtacacttgtgaaggccctcttgctgtcaaatcctcactatgaaaaactcttcagtaccacaaacaaagtttgctgcaaaattcgtcactttcaaagacaaaggcatagggccaaggcaaatcaaaatggagaatttaacagaaacatcttaacaccagaaatagagtcagatatgcaagaggttgtgcaattggtgctacaaaaatcttcagatgacatgatcaacacaaaaattaagcagacatttctactggtggccaagtctttttattatgctgcctactgtgattctaagaccatcaatttccacattggcaaagtaatatttgagactgtggactga

SEQ ID NO: 178 - DNA, 1251 bp, Cannabis sativa
atgctattctcaaggggatttcgtcggattccgaccaccaccttcaatgggttttcccgttggttcgtctctcaccgacccgggtactcacagtcacagaccactactcattgttctagagattcaacccacaagatttttggcggtttcgaagaaagtcgtttctggggttttgctggctctagataccaaattcatcaccagagtagctccttagttgaggaagaattagaccctttttctcttgttgcggatgaactctcacttgttgctaataggttaagggatatggtagttgctgaggtgcccaagcttgcttctgctgctgagtacttctttaaaatgggtgtggaggggaagagatttcgtccaacggtattattgttaatggcaacagcattaaatgttaaggttcccgagcctgctaaagcgttagcagatactttaacacccgagttacgtacaaggcagcaatctgttgcagaaataacagagatgatccatgtggcaagcctactacatgatgatgtcttagatgatgcagaaactagacgcggtgttggttcgttgaattgcattatgggaaacaaggtatcggtattagcaggagattttctgctttctcgagcttgtgttgccctcgcagctttaaagaataccgaggtagttacgctactagccacggttctagaacagctcgtgacaggtgaaaccatgcaaatgacatgtacatctgaacaacgttgtagtatggaatattatatgcaaaagacatattacaaaactgcatcgttaatttcgaacagttgcaagtcggttgcagtcattgctggacaaactacagaagttgcaatgctagcattcgagtacggcaaaaatttgggtttggcttatcaattgatagatgatattcttgatttcaccggcacgtcagcttccctcggaaagggttcactatctgacatccgtcatggtattgttacagctccattattgtacgccatggaagagtttcctcagttgcgcgccgtggttgagcagggatttgaaaaccccaaaaatgttgacattgcactcgactaccttggaaagagtcgcgggatccaaaaggcgagggaacttgcaataaagcatgcaaacctcgctgctgaggcaatcgagtcacttccagagagcgatgatgaagatgtaaaaagatcgagacgagcactagtagatctcacccaaagagtcgttacaagaacaaagtga

SEQ ID NO: 179 - DNA, 1770 bp, Cannabis sativa
atgtctaccaataataataataatattaataatattatttctcgaagatcagcaaactatcaaccttcactttggcattttgattatgtacaatcactttctacccctttcaaggaaggagcatatgccaaaagagttgagaaagtaaaggaagaggtaagagtaatggtgaagagagcaaaagaggaggagaagcctttatctcaacttgagcttattgatgtaatgcaaagacttggaatctcttaccactttgagaatgaaattaatgatacattgaaagatatatataacaacaataatgtgtacaacaccaacaataatgtgtatgccaattctcttgaatttagactcctaagacaacatggttatccggtgtctcaagaaatatttagtacgtgcaaagatgaaagaggcaattttatggtgtcttccaatgatatcaaaggaatgttatctttatatgaagcttcattctatttggtagaaaatgaagatggtattttggaagagacaagagaaaaaacaaagaaatatcttgaggaatacataatcatgatcatggaaaaacaacaatcattattagatcaaaataataataatgattatgattatgattatgaactagtgagccatgcattggaacttccacttcattggagaatgttaagattggagagtaggtggtttattgatgtgtatgagaagagactagacatgaaccctactctacttaccttagctaaactagatttcaacattgtccaatcaatataccaagatgatcttaaacatgtcttcagctggtgggaaagcactaatatgggaaagaagttggaatttgcaagagatagaacaatggtgaatttcttatggacagtaggagttgcatttgagccacatttcaaaagttttagaagaatgattacaaaagtaaatgctttaataacagtaatagatgacatatatgatgtttatggtgcactagatgaattggagctcttcactaacgcagttgagagatgggatattagtgctatggatgggctccctgagtatatgaagacatgttttcttgctttatacaatttcataaatgatcttccatttgatgtgttaaaaggggaagaaggcctccatgtaataaaattccttcagaaatcgtgggcagatctttgcaaatcttatttaagagaagcaagatggtattataatggatacacaccaagatttgaagagtacattgagaatgcatggatatcaatatcaggacctgttatactatcacatttatacttttttgtagtgaatccaaacatggaagatgccttattaagtacttgctttaatggataccctaccataatacgacattcatcgatgattttacgtcttacagatgatcttgcaacttcaacggatgaattgaaaagaggcgatgttcccaaatcaatccaatgcaaaatgtacgaagatggtatatctgaagaggaagctcgtcaacgtattaagttattaataagtgaaacatggaagcttattaataaagattacataaatttggatgatgatgatgatgatggtgatgactactctccaatgttctatgagtctaataatattaataaggctttcattgaaatgtgtttaaaccttggtagaatggcacattgcatttatcaatatggagatggacatggaattcaagatcgccaaacaaaagatcatgtactatcattacttattcaccctattcctcttacccaatag

SEQ ID NO: 180 - DNA, 1872 bp, Cannabis sativa
atgcagtgcatagcttttcaccaatttgcttcatcatcatccctccctatttggagtagtattgataatcgttttacaccaaaaacttctattacttctatttcaaaaccaaaaccaaaactaaaatcaaaatcaaacttgaaatcgagatcgagatcaagtacttgctaccccatacaatgtactgtggtcgataaccctagttctacgattactaataatagtgatcgaagatcagccaactatggacctcccatttggtcttttgattttgttcaatctcttccaatccaatataagggtgaatcttatacaagtcgattaaataagttggagaaagatgtgaaaaggatgctaattggagtggaaaactctttagcccaacttgaactaattgatacaatacaaagacttggaatatcttatcgttttgaaaatgaaatcatttctattttgaaagaaaaattcaccaataataataacaaccctaatcctattaattatgatttatatgctactgctctccaatttaggcttctacgccaatatggatttgaagtacctcaagaaattttcaataattttaaaaatcacaagacaggagagttcaaggcaaatataagtaatgatattatgggagcattgggcttatatgaagcttcattccatgggaaaaagggtgaaagtattttggaagaagcaagaattttcacaacaaaatgtctcaaaaaatacaaattaatgtcaagtagtaataataataatatgacattaatatcattattagtgaatcatgctttggagatgccacttcaatggagaatcacaagatcagaagctaaatggtttattgaagaaatatatgaaagaaaacaagacatgaatccaactttacttgagtttgccaaattggatttcaatatgctgcaatcaacatatcaagaggagctcaaagtactctctaggtggtggaaggattctaaacttggagagaaattgcctttcgttagagatagattggtggagtgtttcttatggcaagttggagtaagatttgagccacaattcagttactttagaataatggatacaaaactctatgttctattaacaataattgatgatatgcatgacatttatggaacattggaggaactacaacttttcactaatgctcttcaaagatgggatttgaaagaattagataagttaccagattatatgaagacagctttctactttacatacaatttcacaaatgaattggcatttgatgtattacaagaacatggttttgttcacattgaatacttcaagaaactgatggtagagttgtgtaaacatcatttgcaagaggcaaaatggttttatagtggatacaaaccaacattgcaagaatatgttgagaatggatggttgtctgtgggaggacaagttattcttatgcatgcatatttcgcttttacaaatcctgttaccaaagaggcattggaatgtctaaaagacggtcatcctaacatagttcgccatgcatcgataatattacgacttgcagatgatctaggaacattgtcggatgaactgaaaagaggcgatgttcctaaatcaattcaatgttatatgcacgatactggtgcttctgaagatgaagctcgtgagcacataaaatatttaataagtgaatcatggaaggagatgaataatgaagatggaaatattaactcttttttctcaaatgaatttgttcaagtttgcaaaaatcttggtagagcgtcacaattcatgtatcagtatggcgatggacatgcttctcagaataatctatcgaaagagcgcgttttagggttgattattactcctatccccatgtaa

SEQ ID NO: 181 - DNA, 1551 bp, Cannabis sativa
atggagttccaacaaataataccctctttccaagtccttctcttttcattttttatgattattgtggtgagcatactcttgaagagagctcaaacaagcaataggtcagcttcaaaactacccccaggtccatggagactacccttcctgggaaacttgcaccaacttttgggccctttgcctcatcacacattcagagacttagccaaaaaacatggaccatttatgtacctcaaaattggacaagttccaaccatagtagtttcatcaccagagtatgctaaagaggtcatgaaagtccatgataatgctcttgcatcaagacccaataatcttgttacgcaaatcttggcatataatggtacggacattatatttgctccatatggtcagtattggaaagaggtaaaaaagatttgtgtgcaagagcttctaaccctatctagggttaaaacttttcaacccattagagaagaagagtcgtttaatattgtaaaaaatatagcttcaaaagttggctcacctatcaatcttactcaaatgttgaaaagtttgtcttatagcatcatagctagggctgcctttggcgagaaaagaagtgatcatgatgacttcgtatatattatgaaggaaactgtgaaattgtctgcagggtttgcatttggagatgtgtttccatctttgagttttcttgattggtatactataagtaaattcaaagatttgaaactaaggtcttcaagaatagtggacagaattatcaagttacatatagatgatcaagacaaggacaatcttaagaaaagtggagaagaggaagacttggttgatgttcttttgaggtttcataaaagtgaagatcctaataacttcacattaacaaaggacaatcttaaagcaattattgctagcatatttggagctgggagtgatacatcatcagtaactatggagttggctatggcagaaatgatgagaaatccaagagtgatgaaaaaagctcaagacgaggttagagaagtctttggcaaaaaagggtttttggatgaatcttcaatcaatgagatgacatacttaaaatcagttgtgaaagaaactttaaggttgcatcccccagctgccatgttatttccaagagaaagtagagaaaagtgtgatattaatggttatgaaattcctatgaaaactaagatacttgtaaatgcatgggcaattggaagagatcctaaatattggattgaacctgagagttttatgccagagaggtttcttgaaagctctattgattttaagggaaataattttgagtttatcccattcggcgctggaaggagaatatgtcccggaatatcatttgctctcaccagtattgagcttcctctagcatttttgctatatcatttcgattggaaacttcccaatggaatgaaacctgaagagttggacatgacagagagatttggtattacagtctgtagaaagaaggatttgtacttgattccttctaaatatgaaccaccttctatggccaaagcaatgaatataaagtag

SEQ ID NO: 182 - DNA, 1545 bp, Cannabis sativa
atggatcttcaactactttcattcccaataatcctcattactttattttttatgtttatggtagtgaaaatagttttgaaaatagctcatcatcaaacaaagaactcagtttcaaagctacccccaggaccatggaaattaccattggtgggaaatatacaccaaatctttggctcttcaccccatgtttcattcagagacttagccaagaaatatgggccattcatgtacctcaaaattggacaaattccaactctaatagtttcatcaccagagtatgttaaagagatcatgagaacccatgatgttgtttttgcatctaggcctcaaactcttgctgctcagatcatggcatataattgtactgacattatattttcttcatatggtgaacattggagacaactcagaaagatttctatgcaagagcttctaagcccgggaagagttcaaacttttcgaccggttagagaagaagagttgtgtaatcttgttgaagggatcatgacatcttcaaaagatgggtcacctatcaatgttactaaaatggttacaaaatgttcttatggcatcacatctagggctgcctttggcaagaaaagcagtgatcacgacgagttcatttcgattgttgaggaagctatcgaggcagctggaggctttgaatttgcagaagtgtttcctgctttgagatttcttgattggaaaagtcgtcctatttttgagagcatcaaactaagatcttcaagaataatggaaaatatcatcaaggagcatataaaagagaaggaaatttcatttgagaaaattggaaaggatgaagatttggttgatgttcttttgaagtttcataagaatggagatgatcttgggcggttcaccctaacaaaagacaatattaaagcagtaatctttgatatctttgtagctggaagtgaaacaacatctttatctgtagattgggctatggtagaaatgatgagatatccaaaagtgatgaaaaaggctcaagaagaggtgagaaaaattattggtacaaaagggtcagtgaatgaatcatcaatcaatgagatgaaatacttaaaattagttgttaaagaaactctaaggttgcatcctccagctcctttgttacttccaagggaaagtacagaaaaatgtgacattgatggttatgagatacctaagaaaacaagagtaatagtaaatgcttgggcaattggaagagatccaaagtattggattgaacctgagaattttatgccagagaggtttatggaaagctctattgattttaagggcaacaattttgagtacattccatttggtggtggaaggagaatatgtccaggcatgttatttggtgttattaatattgagctttcactagcatatttgttataccattttgattggaaacttcctaatggaatgaaccatgaaaatttggatatgacagaattatttggtcttacaatgagaagaaaagatgatttgtatttgattcctactatttatgaccattcttctatagcaaaatcatga

SEQ ID NO: 183 - DNA, 1512 bp, Cannabis sativa
atggatctccaactaccctctttcccagtcctcttgtcccttcttttttctctccttatggcagttaccatactcatgaaaagagctcgaaactcaaaactacctccagggccatggagacttcccttagtgggaaatctccaccagcttttattggggtattcatcatcatcctcatcttacgaggtcttcagtgacttagccaaaaaacatggacccttcatgtacctcgaaatcggacaagttccaaccgtaatagtgtcatcaccagagtacgctaaagagatcatgagaacccacgacgtcgtttttgcgtctaggccacggactcttgccgctcaaatcattggatacgattgtacggacatcgcatttgctccctatggtgattactggagacagctcagaaagatttgtatgcaagctctttttagtcccaaaagagttcaatctttggaacccattagagagaaagaggtgtttaatacgttacaacatatcattgctaattccaataaactcaattttactcaaatggtcacaaatttgtcttatagcatcgtatctcgagcagcttttggggaaaaaagcagtgatcatgatgagttcatatcgattgtggaggaagatataaaggtagctggagggtttgaatttggggagttgtttccttctttgagatttcttgattggaccagtaggcctaaatatgaaagcctcaaacagaggtcttctagaatattggaaaagatcatcaaacaacatatgattaatcagaataatgagaaaagtgaagaagagcaagacttggttgatgttcttctcaagtatcataacaaggcaaatcttgggttaacccttgacaatatcaaaggagtaatctgggacatttttgaagctggaagtgaaacaacagctgtaacagaggattgggctatggtagaattgatgagaaatccaataatgatgaaaaaggctcaagatgaggttagggaagtttttggaagaaaaggattagttgataaaacatcaatccatgagatgaaatacttaaaattaattattaaagaaactctaaggttgcatcctcctgctccttttttacttccaagggaaaatagtgaaaaatgtgaaattaatggttatgagatacctaatggaacaagagtattggtaaatgtttggggaattggaagacatgctaagtattggaatgaacctgaaagttttataccagaacggtttgatgatagctctattgacttcaaaggtaataattttgagtatattccatttggtgctggaaggagaatatgtcctggcataacatttggtgttgttagtcttgagtattctcttgctttaatgttataccactttgattggaaacttcctaatggaatgaaacctcaagatttagacatgagtgagttatttggcattgcagtaaggagaaaagatgatttgtacttaattcctacaatttatcatcagtcacctcttgcaaattaa

SEQ ID NO: 184 - DNA, 804 bp, Cannabis sativa; identical to SEQ ID NO: 169

SEQ ID NO: 185 - DNA, 1032 bp, Cannabis sativa
atggaagaagtgagcaataaacaactgctgctgaagaactatgtttccggttatccgaaagagtcggatatggtcttagccacttccaccatcaagcttaagcttccagaaggctccaatggtgttctagtaaagaacctttatttgtcatgcgatccttacatgggaccccgaatgaagaacctcaacaatggctttttcatagagcccttcaaacttggttctcctatcactgggaatggaatttgtaaggtactaaaatctggaaatccaaacttcaaggaaggagatttggtctctggagtgacagggtgggagcaatacagtgttattgagtccacgaaatatatgtctaaaattcaaaacactgacgtgcctctgtcttactatactggattactaggaatgcctggtatgactgcttatgctggcttcttcgaggtttgctctccgaaaaagggggaatatgtgttcatttctgcagcatcaggagcagttggtcagcttgttgggcagttcgcaaagctcttgggttgttatgttgttggaagtgctggaaggaacgaaaaggttgatttgttgaagaacaaatttggctttgatgaggctttcaactacaaagaagagtctgactttgatgtagctttaaaaaggtattttccagaaggtatagatatatactttgataatgttgggggaaagctgctagatgctgttctacaaaacatgagaagccatgctcgaatttctgtttgtggaatgatctcacagtacaaccttgaacaaactgaaggtgtacataatctgacgaatcttgtgtggaaaagtgctcgaatggttggatttctggttgctgactattaccacctatacccaaaatttctcgaatatgttatgccttacttaaaagaaggaaaaattgtgtatgttgaagatatagctgaagggctaaagagtgccccaaaagctttggtagggctcttcaatggatgcaatgtgggaaaacaggtggttctagtctcttcggaatga

SEQ ID NO: 186 - DNA, 1884 bp, Cannabis sativa
atggaacaagagtactcctcttcatttctctcaacaaagagatatgctgttgttacaggtggaaacaaggggatcgggtttgaaatatgcagacaattagcttcaaatggcatcaaggtcgtgttaactgccagagatgaaaagaggggtgttgaagctgttgagaaactgatcaaagaatcaaatttcactagtgaagacaatgtcgtttttcacaggcttgatgtcgttgaccctgacaccattgcttctttggcagattacatcaaatcccacttcgggaagcttgacattttgataaataatgcaggaattgctgggggtacacttgattcttatggttatgcacaagccactgagcttgctggtggtaattggccagagaacggcaattggaatgagataatgacccagaactatgaatcggctgaagaatgcctgaaaacaaattattatggagccaaagcaacgattgaagcacttgttccactcctccaattgtctgattcaccaagaatcgtcaatgtttcatcctctcttggtctcttacaatacataccgaatgaatgggccaaaaacatgctgagcgatgttgataagctaagagaagagcaaatagatgaggtagtgagtgagtttctgaatgatttcaaacaaggtaagttagaagccaagaagtggcctacagagatttcggggtacaaagtttcgaaagcttcgctgaacgcgtacacaaggattttggcgaagaaataccctcaaatgtgcgttaactgtgtgtgccctggctatgtcaaaactgatatcacttgcaatactgggcagttggttgctgccgaaggtgctgaaagtcccgtgatgctagccttgttgcccctcgccaagccttccggcttcttcttctccaggaagcaactctcccctttctgccattcattcatcactaaacgaaccaaaacatttttattacaaacccaagtttcatcaacaatgtctggagcttcagaaagatatgcaattgtaacaggggcaaataaggggattggactagagatagtgagacaattggccttgaatggagtcaatgtggtcttaacagcaagagatgagaaaaggggtcttgaagctttggagaaactcaaagagaaagagaaaaacctctctcacaaagtgctgtttcaccagctcgacgtggctgatccagctagcattgttgctatggttgatttcattaaaacacatttcggcaaacttgatattttggtgaacaatgctggcgttggtggaacagaagaagacatgcatgcaattgtagcttctttaaatgctaagaccccaaaagaaggtgatattaagaaaactactcaaacttatgagtcagccaaagaatgcatgcaaataaactattatggtgctaaaaaaactgctgaagagcttattccccttctccagttatctgattcaccacgaattgttaatgtttcttctaccatgggaaagctacagaatatatcaaatgactgggctaaaggtgttcttagtgatgctgagagtctcacagaggataaaattgatgaagtgataagagagtttctgaaagatttcaaagaaggttcattggaaaccaaaggctggcctagttttttgtccccatatactgtctcaaaagcagcccttactgccttcacaagggtactagcaaagaagcaccccaactttatcatcaactgtgtatgccctggatttgtgaagacagagataaacttcaacaccggtattttacagcctgaagaaggcgctgcgagtccagtaaggttagcattgcttccaaatgatgcaccttcaggcctcttctttgatcggtcacaggtttcgtctttttga

SEQ ID NO: 187 - DNA, 1587 bp, Cannabis sativa
atgttattattattccattacaatatgtccttcttagacttaaccagtaataatctctcttcctttaccattttattagcaaccttattattctttgtgctgctatataaatcatggttctctattaaaacaaattctccaccatcgcctccaaagcttccaataattggaaacctccaccagctcgggttgtaccctcaccgaacgctgcaggcctggagcaggcgctatggccccgtcatgcagctccggctaggcagcgtgccggttctcgtcatctcctctgccaccgccgctcgtgagattatgaagactcacgacattgccttttccaaccgacccaagtcctgtgccctcgagaagctcctctacaactacagagacattgcttcggcaccttatggcgagtactggaggcagataaagagcgtttccgtgcttcatctgttgaataataaaagggttcagtcctatagagctgtaagggaagaggagaccaagctcatggttgagaagattcgaaagtcttgtgggactggggtgaatttgagcgagttgtttgtaaggctaaccaacgacgtcgtttgtagggtggccttggggagaaagtacggtgaagaaagtggtgggaagaggtttaaggagcttctgggggagtttacggagctacttgggggtttctatgtaagagactattttcctaagcttggttggttgagtcgtgtgagtggtttggatggtagaatggataaagtggctaaggagttcgatgagtttctggaaggtgttcttcatgaccatatgaatacaaataagaatgttgatgatgaacagaaagattttgtggatattttgctttggattcagagggaaaactcgcttggattttctattgataggacttccataaaggctctcatattggacacatttgcagcgggaacagacacaacctatacagtcctagaatgggcaatgactgagctcataagacatccaaacgccatgaaaaagcttcaaaacgagatcagaacaacaatccttaataagaagataactaacattgccatgccagaagaatatattaatagtgttacagaagacgacctagaaaaaatgccatacttgaaggcagttttcaaagaaactctccgtctgcatccaccaatccctttaatcgttcctcgactcacaatacaagacatgaaaataagtggatacgacgtcgcttcaggcacccaagtattcatcaatgcatgggcaatcgggagagatccgaccttgtgggaagaggaaccagacaagtttgaacctgagaggtttttgctgaagaacgctgcaattgattacaaaggacatgacttcgagttgatccctttcggggccgggaggcgaggctgccctgggattgtatttgccatggctgttaacgagcttgctttggctagtgtggtctataagtttgattgggcgttgttgagtagtggagaagaggatttggattattatcatatgactgaaaccacaggtttgactacgcatagaaagtttcctcttatggctgtgccaactgaatattatcaatga

SEQ ID NO: 188 - DNA, 1701 bp, Cannabis sativa
atgtctccttgcgaagctacaattgatgaaaaacgccctaatatgccaaagtttactccaaccatttggggtgattatttcatgtctcatgcttcaagtcatcactcatctcttatggaaactatggagaataataacaaagagagttatgagaagattattgagatgaaggaacaagtgaagaataaattacttcatggtcttcatcctttggaaaaccctttggagacacttgaatatattgatgatattcaacgattggggttgtcttattattttgaaaatgaaattgaacaaaatttggagcaatttcataataattatcaaaatctaattgattttggtgataataacctttatgctgatgctctttgctttcggttgcttaggcaacaaggttataatattgcatgtgacatattcgacaagtacaagaatgaaaatgaaaaatttaaagaatcaatttcgagtgacattcgaggaatgttgaacttgtatgaagctgcacaaatgagagttcatggagagaaaatactagacgaagcacttatctttacaactactcatcttgaatcctcagttaaaacatgtcaattgagctctccttatctagacctagtgaaacatgccctaatgcaccctattcgaaagagcttacaaagaagagaggcaagactttacatatcactttatcatcaactaccttctcatgaggagattcttttaatacttgctaaactagatttcaacctgcttcaaaaactacatcaaaaggaactaagttacataacgaggtggtggaaggagtttgattacaaaagtaagcattcatttataaaagacagaatagtggagtgctatttctgggtttatggagtgttttttgaggcagaaacttcccaaatcagactaataatcaccaaattaattgctattctcacaataattgatgatgcttatgatagctttggtacacttgaagaactagagccttttactcaagcaatagaaaggtgggatatatgtgccatagatactctgcctgagtacatgaaaatattttacatgaaacttttggagatctacaatgaaattgaacaattttctaaggaaagatcatactgccctagctatgctaagaaaggggtgcaatctctaattagagcttattttaaggaagccaaatggttacacacaaaatatataccaacattagaagaatatatgccagttgggattgatagtgcaggatcttttatgctcatttcaatggtttttattggaatgggagatattgttacaaaacattctatggattggatattttctaatcctcaacctaaaattatacaaactatggcaatagttggaagagttatgaatgacattggctaccataagtcggagcgaaagaaatcatcaggagaaattgtggcttcaactgtggagtgttacatgaaacaatatggcgtgactggtgaagaagctatagagaaacttagccaacaagttaaagattcatggaaagatctcaatgaagatcttctcaatccaatcactatccctaggccactcttaatgcaagttctaaagcttgtacgagtgaaccatgagatttatagagaaggagatggctttacacaacccactttgctcaagaatttgattcattctctcatcatcaatccaattgacttttga

SEQ ID NO: 189 - DNA, 1902 bp, Cannabis sativa
atggcgaccgctattttctccaaccccaagttctcccccacaatcaccaccacctcctccaaaaaccattaccactaccaacgccgtacacatttactactccacgacaaagtccaagcttttcaagccgcctctcttaaactcaacccaaatcctcattacaagaaaccccagatcgtttcctgccagagctccggtagcgagtcaccggacacagagaaggtgcggcggccggagtacattccgaaccgtatctccgatccaaactatgtacgtatcttcgacactactctccgagacggtgagcagtcccctggggccgccctgacgtcaaaggagaagctggacattgccagacagctttccaagctcggcgttgacataatcgaggctggattccccgccgcctcgaaagatgacttcgaggccgtcaagattattgccaaagaggtcggtaacgccgttgacgccgacggctatgttcccgttatctgtggtctgtcgaggtgtaatgagaacgatattaggagggcttgggaggcggtcaagtacgccaaaaggcctaggattcatactttcattgctacaagtccaattcacatggagtacaagttgagaaagagtaaggagcaggtgattgagatcgctaggaacatggtgaagtttgctcggagtttggggtgtgatgatgttgagtttagccctgaagatgctggcaggtctgagagggaattcttgtatcagattttgggagaagttataaaggctggagcaacaactctaaacatacctgacactgttggttacaacgtgccaaaagaatttggagaattgattgctgacattaaagccaatacccctggaattgagaatgttgtcatttctacacactgtcaaaatgatcttggactttctactgcaaacacgatatcgggggcatgcgcaggtgctagacaattagaagtaacaatcaacggcattggtgaaagagccgggaatgcatctctggaggaggttgtaatggccataaaatgccgtggagatcaacaactgggaggactttatactggaatcaacacaagacacatctcaatgacaagcataatggttgaggaatacacagggttgcaagtacagccacataaggctattgttggagccaatgcttttgcacatgaaagcggtatccatcaggatggaatgcttaagcacaaaggtacatatgaaatcatatccccagaagatatagggcttgaacgaagcaatgaagctggtatagtccttggaaaactcagtggtcgccatgcattgaaacaacaacttgaggagcttggttatgagcttgaggatgagcaacttgagagtatattctggcgcttcaaatctgtggctgaacttaagaagaggataactgatgctgacctcagagcactagtttcggatgaagtttttcaaccagaagtcatctggaagttcgttgatttgcaggttacatgtggaactcttggtctttcaactgcaaccgtcaaacttattggttcagatgggaaagagcatgttgcttgttcagtaggaactggtccagtggactcggcttacaaagctgttgatctgattgtgaaggaaccagtagcactcctggagtattcaatgaatgctgttactgaaggtatagatgcaattgcaaccacccgtgtgctaatccgagaggaaacgagcgacttgtcaggtcatggttcaactgttgaacgagttactcggacatttagtgggaacgggtcaggaatggatattgtggtttcaagtgtaaaggcttacattggtgcgataaacaagatgttaggtttcaaagataggaccgttgtgaattcttctgaagagagaatacccatatctgcataa

SEQ ID NO: 190 - DNA, 1566 bp, Cannabis sativa
atggggaggcactcttgttgttacaagcagaaactgagaaaagggttgtggtcaccagaagaagatgagaaacttcttaattatataaccaagcatggacatggctgctggagctctgtccctaagctagctggtcttcagagatgtggaaaaagttgcaggctaaggtggataaattatttgaggcctgatttgaaaagaggcccattttcacaacaagaggagaatttgataattgaacttcatgcagttcttggcaacagatggtcacagattgcagctcagttaccaggaagaacagataatgagattaaaaacttatggaattcttgcattaagaagaaactgaggcaaaaagggattgacccaaatactcataagccattatctgaggtagaaaatgacattggtaataaattggagaacaagggtaacaaagctgcaaccaataacaacaacaatgagaatattaataattctactgttagagcttcttcattaggaaacttatccaatgatcatcatcatcatcatcatcatcatctgaatctagctgaccagtcacaaccatcaatggcggccatcaatcgttacccactattggaagtctcatcctcaactccgccgacacaagaattcttcatagaaaaatcaacagataccagatcatcaccatcaatatcatcatcatcaccttgtgatttttctacctacttctctttccactcaaacaattacaatacgacgtcgtccgctgctgcagctgctgctgtttctcatcatcaagatcaaaacaacaacaacaacatggccagtttctgcttcaacattaatcaaaattcaactagacctccacaacaccatcatcataatcagatgattagtaatctcatccagccactacaacaacaagtatcaccttcatcaacaacaacagcatcatcatcatcaccaccctccaatattccacgtgtaaagccctccataagtctccccttattatctgatcaccaaaacaacagtaatagcactactactactactacaacaactactggagccgtacaaaattgggaaactagtactttcagcaacaacggaagtagtagtagtagctgcaatatcgaattacaaggtaataataataacaacaacaacaacttctttgatcacaacactaattccaccgccgcggccgccgccgccgccgctcctaataacttctcgtggggattagtcaatgaaagtactgttggtagcataaaatctgatgacccagaagacataaaatggtctgaatatctccatagcccttttcttcttggtggaggaattagtaatactaataatcaaaattcttcttcttcttcacatcttcaacccattttgtacagtaacattgtgaaaccagaatcacactttagtaatactactactgctacaggatcaaaccccacgtggcatcatcagaacgatcatcatcagctacaagcggcttcatcagaaataatgtacactaataaagatctacagagacttgctgtagcttttggacagaccctttag

SEQ ID NO: 191 - protein, 370 aa, Cannabis sativa
MSTVNLTWVQTCSMFNQGGRSRSLSTFNLNLYHPLKKTPFSIQTPKQKRPTSPFSSISAVLTEQEAVKEGDEEKSIFNFKSYMVQKANSVNQALDSAVLLRDPIMIHESMRYSLLAGGKRVRPMLCLSACELVGGKESVAMPAACAVEMIHTMSLIHDDLPCMDNDDLRRGKPTNHKVFGEDVAVLAGDALLAFAFEHMAVSTVGVPAAKIVRAIGELAKSIGSEGLVAGQVVDIDSEGLANVGLEQLEFIHLHKTGALLEASVVLGAILGGGTDEEVEKLRSFARCIGLLFQVVDDILDVTKSSQELGKTAGKDLVADKVTYPRLMGIDKSREFAEQLNTEAKQHLSGFDPIKAAPLIALANYIAYRQN

SEQ ID NO: 192 - protein, 822 aa, Cannabis sativa
MPSLFSQSLLLPFSQNTNTLSLFHQPKLLPPGASLLEAKDKQVNFDRDIRSKCSAISKPRTHDVFQSGGLPVIKWHEIVEDDIDGEEEDTKWTRSNEIEERVASIKSMLESMDEGEISISAYDTAWVALVEDIHGSGLPQFPSSLQWIATHQLSDGSWGDADIFSAHDRLINTLACVVALKSWNLYPEKCQKGMAFFNANISKLERENPEHMPIGFEVAFPSLLEIARKLNLEVPEDSPVLKVIYARRDFKLTRIPRDIMHTVPTTLLHSLEGMVGLDWEKLLKLQSQDGSFLFSPSSTAFALMETKDRNCLQYLTKAVQRFNGGVPNVYPVDLFEHLWVADRLQRLGISRFFEPQIEECIDYVFRNWTEKGIGWARNSKVEDIDDTAMGFRLLRLHGHKVSADVFQHFKKGDDFFCFRGQSTQAVTGMYNLYRASQLVFPGEKILEDAMEFSSKFLRKKQASNELLDKWIITKDLPGEVGFALEVPWNANLPRVETRFYIEQYGGQNDVWIGKTLYRMRKVNNDEYLELAKLDYNICQALHSIEWHNLLKWYRDCKLENYGVSRRNLLLAYFLAAASIFEPDRADERLAWAKTAALMQAIQSHFDDQKASSEHRIAFVSAFKRSCNMPSYLITRVSNISDTDHGLLRTLMTTLSHLSLDTMMLYGRDITHHLRQAWEKWLVKWQEGGDGHYEEEAELLIQTINLSSGRTLVKALLLSNPHYEKLFSTTNKVCCKIRHFQRQRHRAKANQNGEFNRNILTPEIESDMQEVVQLVLQKSSDDMINTKIKQTFLLVAKSFYYAAYCDSKTINFHIGKVIFETVD

SEQ ID NO: 193 - protein, 416 aa, Cannabis sativa
MLFSRGFRRIPTTTFNGFSRWFVSHRPGYSQSQTTTHCSRDSTHKIFGGFEESRFWGFAGSRYQIHHQSSSLVEEELDPFSLVADELSLVANRLRDMVVAEVPKLASAAEYFFKMGVEGKRFRPTVLLLMATALNVKVPEPAKALADTLTPELRTRQQSVAEITEMIHVASLLHDDVLDDAETRRGVGSLNCIMGNKVSVLAGDFLLSRACVALAALKNTEVVTLLATVLEQLVTGETMQMTCTSEQRCSMEYYMQKTYYKTASLISNSCKSVAVIAGQTTEVAMLAFEYGKNLGLAYQLIDDILDFTGTSASLGKGSLSDIRHGIVTAPLLYAMEEFPQLRAVVEQGFENPKNVDIALDYLGKSRGIQKARELAIKHANLAAEAIESLPESDDEDVKRSRRALVDLTQRVVTRTK

SEQ ID NO: 194 - protein, 589 aa, Cannabis sativa
MSTNNNNNINNIISRRSANYQPSLWHFDYVQSLSTPFKEGAYAKRVEKVKEEVRVMVKRAKEEEKPLSQLELIDVMQRLGISYHFENEINDTLKDIYNNNNVYNTNNNVYANSLEFRLLRQHGYPVSQEIFSTCKDERGNFMVSSNDIKGMLSLYEASFYLVENEDGILEETREKTKKYLEEYIIMIMEKQQSLLDQNNNNDYDYDYELVSHALELPLHWRMLRLESRWFIDVYEKRLDMNPTLLTLAKLDFNIVQSIYQDDLKHVFSWWESTNMGKKLEFARDRTMVNFLWTVGVAFEPHFKSFRRMITKVNALITVIDDIYDVYGALDELELFTNAVERWDISAMDGLPEYMKTCFLALYNFINDLPFDVLKGEEGLHVIKFLQKSWADLCKSYLREARWYYNGYTPRFEEYIENAWISISGPVILSHLYFFVVNPNMEDALLSTCFNGYPTIIRHSSMILRLTDDLATSTDELKRGDVPKSIQCKMYEDGISEEEARQRIKLLISETWKLINKDYINLDDDDDDGDDYSPMFYESNNINKAFIEMCLNLGRMAHCIYQYGDGHGIQDRQTKDHVLSLLIHPIPLTQ

SEQ ID NO: 195 - protein, 623 aa, Cannabis sativa
MQCIAFHQFASSSSLPIWSSIDNRFTPKTSITSISKPKPKLKSKSNLKSRSRSSTCYPIQCTVVDNPSSTITNNSDRRSANYGPPIWSFDFVQSLPIQYKGESYTSRLNKLEKDVKRMLIGVENSLAQLELIDTIQRLGISYRFENEIISILKEKFTNNNNNPNPINYDLYATALQFRLLRQYGFEVPQEIFNNFKNHKTGEFKANISNDIMGALGLYEASFHGKKGESILEEARIFTTKCLKKYKLMSSSNNNNMTLISLLVNHALEMPLQWRITRSEAKWFIEEIYERKQDMNPTLLEFAKLDFNMLQSTYQEELKVLSRWWKDSKLGEKLPFVRDRLVECFLWQVGVRFEPQFSYFRIMDTKLYVLLTIIDDMHDIYGTLEELQLFTNALQRWDLKELDKLPDYMKTAFYFTYNFTNELAFDVLQEHGFVHIEYFKKLMVELCKHHLQEAKWFYSGYKPTLQEYVENGWLSVGGQVILMHAYFAFTNPVTKEALECLKDGHPNIVRHASIILRLADDLGTLSDELKRGDVPKSIQCYMHDTGASEDEAREHIKYLISESWKEMNNEDGNINSFFSNEFVQVCKNLGRASQFMYQYGDGHASQNNLSKERVLGLIITPIPM

SEQ ID NO: 196 - protein, 516 aa, Cannabis sativa
MEFQQIIPSFQVLLFSFFMIIVVSILLKRAQTSNRSASKLPPGPWRLPFLGNLHQLLGPLPHHTFRDLAKKHGPFMYLKIGQVPTIVVSSPEYAKEVMKVHDNALASRPNNLVTQILAYNGTDIIFAPYGQYWKEVKKICVQELLTLSRVKTFQPIREEESFNIVKNIASKVGSPINLTQMLKSLSYSIIARAAFGEKRSDHDDFVYIMKETVKLSAGFAFGDVFPSLSFLDWYTISKFKDLKLRSSRIVDRIIKLHIDDQDKDNLKKSGEEEDLVDVLLRFHKSEDPNNFTLTKDNLKAIIASIFGAGSDTSSVTMELAMAEMMRNPRVMKKAQDEVREVFGKKGFLDESSINEMTYLKSVVKETLRLHPPAAMLFPRESREKCDINGYEIPMKTKILVNAWAIGRDPKYWIEPESFMPERFLESSIDFKGNNFEFIPFGAGRRICPGISFALTSIELPLAFLLYHFDWKLPNGMKPEELDMTERFGITVCRKKDLYLIPSKYEPPSMAKAMNIK

SEQ ID NO: 197 - protein, 514 aa, Cannabis sativa
MDLQLLSFPIILITLFFMFMVVKIVLKIAHHQTKNSVSKLPPGPWKLPLVGNIHQIFGSSPHVSFRDLAKKYGPFMYLKIGQIPTLIVSSPEYVKEIMRTHDVVFASRPQTLAAQIMAYNCTDIIFSSYGEHWRQLRKISMQELLSPGRVQTFRPVREEELCNLVEGIMTSSKDGSPINVTKMVTKCSYGITSRAAFGKKSSDHDEFISIVEEAIEAAGGFEFAEVFPALRFLDWKSRPIFESIKLRSSRIMENIIKEHIKEKEISFEKIGKDEDLVDVLLKFHKNGDDLGRFTLTKDNIKAVIFDIFVAGSETTSLSVDWAMVEMMRYPKVMKKAQEEVRKIIGTKGSVNESSINEMKYLKLVVKETLRLHPPAPLLLPRESTEKCDIDGYEIPKKTRVIVNAWAIGRDPKYWIEPENFMPERFMESSIDFKGNNFEYIPFGGGRRICPGMLFGVINIELSLAYLLYHFDWKLPNGMNHENLDMTELFGLTMRRKDDLYLIPTIYDHSSIAKS

SEQ ID NO: 198 - protein, 503 aa, Cannabis sativa
MDLQLPSFPVLLSLLFSLLMAVTILMKRARNSKLPPGPWRLPLVGNLHQLLLGYSSSSSSYEVFSDLAKKHGPFMYLEIGQVPTVIVSSPEYAKEIMRTHDVVFASRPRTLAAQIIGYDCTDIAFAPYGDYWRQLRKICMQALFSPKRVQSLEPIREKEVFNTLQHIIANSNKLNFTQMVTNLSYSIVSRAAFGEKSSDHDEFISIVEEDIKVAGGFEFGELFPSLRFLDWTSRPKYESLKQRSSRILEKIIKQHMINQNNEKSEEEQDLVDVLLKYHNKANLGLTLDNIKGVIWDIFEAGSETTAVTEDWAMVELMRNPIMMKKAQDEVREVFGRKGLVDKTSIHEMKYLKLIIKETLRLHPPAPFLLPRENSEKCEINGYEIPNGTRVLVNVWGIGRHAKYWNEPESFIPERFDDSSIDFKGNNFEYIPFGAGRRICPGITFGVVSLEYSLALMLYHFDWKLPNGMKPQDLDMSELFGIAVRRKDDLYLIPTIYHQSPLAN

SEQ ID NO: 199 - protein, 267 aa, Cannabis sativa
MTEHSPLTPKTKLHGKVAVVTGGASGIGEATARKFAADGARAVVIADIQDEKGQNVAASIGLERSTYVHCDVTDEAQVAALIDSTVQKYGQVDVMFSNAGVPCESDQTILDLDLVAYDKVFAVNARGMAACVKHAARAMVEGGVRGSVICTASNLASIGTEKYTDYTMSKHAVLGLVRSASLQLGARGIRVNAVSPGPLRTPLLKAFIDRSEEEQDKMIEASLSLKNGRTPSVENVADAVSFLASDESEFITGHNLAVDGGYIHHPP

SEQ ID NO: 200 - protein, 343 aa, Cannabis sativa
MEEVSNKQLLLKNYVSGYPKESDMVLATSTIKLKLPEGSNGVLVKNLYLSCDPYMGPRMKNLNNGFFIEPFKLGSPITGNGICKVLKSGNPNFKEGDLVSGVTGWEQYSVIESTKYMSKIQNTDVPLSYYTGLLGMPGMTAYAGFFEVCSPKKGEYVFISAASGAVGQLVGQFAKLLGCYVVGSAGRNEKVDLLKNKFGFDEAFNYKEESDFDVALKRYFPEGIDIYFDNVGGKLLDAVLQNMRSHARISVCGMISQYNLEQTEGVHNLTNLVWKSARMVGFLVADYYHLYPKFLEYVMPYLKEGKIVYVEDIAEGLKSAPKALVGLFNGCNVGKQVVLVSSE

SEQ ID NO: 201 - protein, 627 aa, Cannabis sativa
MEQEYSSSFLSTKRYAVVTGGNKGIGFEICRQLASNGIKVVLTARDEKRGVEAVEKLIKESNFTSEDNVVFHRLDVVDPDTIASLADYIKSHFGKLDILINNAGIAGGTLDSYGYAQATELAGGNWPENGNWNEIMTQNYESAEECLKTNYYGAKATIEALVPLLQLSDSPRIVNVSSSLGLLQYIPNEWAKNMLSDVDKLREEQIDEVVSEFLNDFKQGKLEAKKWPTEISGYKVSKASLNAYTRILAKKYPQMCVNCVCPGYVKTDITCNTGQLVAAEGAESPVMLALLPLAKPSGFFFSRKQLSPFCHSFITKRTKTFLLQTQVSSTMSGASERYAIVTGANKGIGLEIVRQLALNGVNVVLTARDEKRGLEALEKLKEKEKNLSHKVLFHQLDVADPASIVAMVDFIKTHFGKLDILVNNAGVGGTEEDMHAIVASLNAKTPKEGDIKKTTQTYESAKECMQINYYGAKKTAEELIPLLQLSDSPRIVNVSSTMGKLQNISNDWAKGVLSDAESLTEDKIDEVIREFLKDFKEGSLETKGWPSFLSPYTVSKAALTAFTRVLAKKHPNFIINCVCPGFVKTEINFNTGILQPEEGAASPVRLALLPNDAPSGLFFDRSQVSSF

SEQ ID NO: 202 - protein, 528 aa, Cannabis sativa
MLLLFHYNMSFLDLTSNNLSSFTILLATLLFFVLLYKSWFSIKTNSPPSPPKLPIIGNLHQLGLYPHRTLQAWSRRYGPVMQLRLGSVPVLVISSATAAREIMKTHDIAFSNRPKSCALEKLLYNYRDIASAPYGEYWRQIKSVSVLHLLNNKRVQSYRAVREEETKLMVEKIRKSCGTGVNLSELFVRLTNDVVCRVALGRKYGEESGGKRFKELLGEFTELLGGFYVRDYFPKLGWLSRVSGLDGRMDKVAKEFDEFLEGVLHDHMNTNKNVDDEQKDFVDILLWIQRENSLGFSIDRTSIKALILDTFAAGTDTTYTVLEWAMTELIRHPNAMKKLQNEIRTTILNKKITNIAMPEEYINSVTEDDLEKMPYLKAVFKETLRLHPPIPLIVPRLTIQDMKISGYDVASGTQVFINAWAIGRDPTLWEEEPDKFEPERFLLKNAAIDYKGHDFELIPFGAGRRGCPGIVFAMAVNELALASVVYKFDWALLSSGEEDLDYYHMTETTGLTTHRKFPLMAVPTEYYQ

SEQ ID NO: 203 - protein, 566 aa, Cannabis sativa
MSPCEATIDEKRPNMPKFTPTIWGDYFMSHASSHHSSLMETMENNNKESYEKIIEMKEQVKNKLLHGLHPLENPLETLEYIDDIQRLGLSYYFENEIEQNLEQFHNNYQNLIDFGDNNLYADALCFRLLRQQGYNIACDIFDKYKNENEKFKESISSDIRGMLNLYEAAQMRVHGEKILDEALIFTTTHLESSVKTCQLSSPYLDLVKHALMHPIRKSLQRREARLYISLYHQLPSHEEILLILAKLDFNLLQKLHQKELSYITRWWKEFDYKSKHSFIKDRIVECYFWVYGVFFEAETSQIRLIITKLIAILTIIDDAYDSFGTLEELEPFTQAIERWDICAIDTLPEYMKIFYMKLLEIYNEIEQFSKERSYCPSYAKKGVQSLIRAYFKEAKWLHTKYIPTLEEYMPVGIDSAGSFMLISMVFIGMGDIVTKHSMDWIFSNPQPKIIQTMAIVGRVMNDIGYHKSERKKSSGEIVASTVECYMKQYGVTGEEAIEKLSQQVKDSWKDLNEDLLNPITIPRPLLMQVLKLVRVNHEIYREGDGFTQPTLLKNLIHSLIINPIDF

SEQ ID NO: 204 - protein, 633 aa, Cannabis sativa
MATAIFSNPKFSPTITTTSSKNHYHYQRRTHLLLHDKVQAFQAASLKLNPNPHYKKPQIVSCQSSGSESPDTEKVRRPEYIPNRISDPNYVRIFDTTLRDGEQSPGAALTSKEKLDIARQLSKLGVDIIEAGFPAASKDDFEAVKIIAKEVGNAVDADGYVPVICGLSRCNENDIRRAWEAVKYAKRPRIHTFIATSPIHMEYKLRKSKEQVIEIARNMVKFARSLGCDDVEFSPEDAGRSEREFLYQILGEVIKAGATTLNIPDTVGYNVPKEFGELIADIKANTPGIENVVISTHCQNDLGLSTANTISGACAGARQLEVTINGIGERAGNASLEEVVMAIKCRGDQQLGGLYTGINTRHISMTSIMVEEYTGLQVQPHKAIVGANAFAHESGIHQDGMLKHKGTYEIISPEDIGLERSNEAGIVLGKLSGRHALKQQLEELGYELEDEQLESIFWRFKSVAELKKRITDADLRALVSDEVFQPEVIWKFVDLQVTCGTLGLSTATVKLIGSDGKEHVACSVGTGPVDSAYKAVDLIVKEPVALLEYSMNAVTEGIDAIATTRVLIREETSDLSGHGSTVERVTRTFSGNGSGMDIVVSSVKAYIGAINKMLGFKDRTVVNSSEERIPISA

SEQ ID NO: 205 - protein, 521 aa, Cannabis sativa
MGRHSCCYKQKLRKGLWSPEEDEKLLNYITKHGHGCWSSVPKLAGLQRCGKSCRLRWINYLRPDLKRGPFSQQEENLIIELHAVLGNRWSQIAAQLPGRTDNEIKNLWNSCIKKKLRQKGIDPNTHKPLSEVENDIGNKLENKGNKAATNNNNNENINNSTVRASSLGNLSNDHHHHHHHHLNLADQSQPSMAAINRYPLLEVSSSTPPTQEFFIEKSTDTRSSPSISSSSPCDFSTYFSFHSNNYNTTSSAAAAAAVSHHQDQNNNNNMASFCFNINQNSTRPPQHHHHNQMISNLIQPLQQQVSPSSTTTASSSSPPSNIPRVKPSISLPLLSDHQNNSNSTTTTTTTTTGAVQNWETSTFSNNGSSSSSCNIELQGNNNNNNNNFFDHNTNSTAAAAAAAAPNNFSWGLVNESTVGSIKSDDPEDIKWSEYLHSPFLLGGGISNTNNQNSSSSSHLQPILYSNIVKPESHFSNTTTATGSNPTWHHQNDHHQLQAASSEIMYTNKDLQRLAVAFGQTL

SEQ ID NO: 206 - DNA, 1500 bp, Artificial Sequence
  Description of Artificial Sequence: Synthetic polynucleotide
tcttaaacccttatgtgtttatttcattgttttagaattcatattaggatgttaatgaaacatacttgttagtaaatctagatcctcgtaaaatatttccaagaaatataacagctactcagattatacacaaaaatcccaatagacaaaaacactgtaaaagtcatactaaaactcaaaaaaaaaaaaaaatacaaccaaaccaaatcaataaaaactaaaaaatcatcaatgggcaggcaagacttcaattgtagttttgacttgcctgagtgaatcgattccggaaaagaattgaaattgtggtcgtcgttcaagctcttggctgaatctcctgattgttcaagccctctcatcagaattatctccattgttcaagccctctcatcggaagctcctggtttttccatcaatttttggccatggtcactatggaggtaagtagattgaagaagacgaatgtgagagagaaggcaaagggtcgaggtgggcgtggtgcagtttttgaggtgggagttgtttctcggccgcaacaatccaccatgtttcttagtttttttttctttttgttctgggaatcgattgtttttgggtgtggattgttggttgataggttttgggggtggtttctgggcagtgagaaggtgagaagaagaagaagaagaagaaagttatggtttgaagaagaagaagaaggaaaatcaggtgggtgggtggggtttcgtgtgaagcagaaaaaagaaaaaaaaaacaagttattttatgatttgaaaatattatttttagtttttttatattattttaaattttttttattaaaattataatttggaccagtaatacttcaagacgtggcattttaaaaattaataaacggacagttatcttagggaccaacggactcacagaaaatgtgaccttggggactattaccgccaatttttgaggtttgggaataatctccatcaacccttaatttttggggacttttaccgcaattatccctattatacataatattttataacaagtttttttttattattttttattatttgatgaagtaattaaagaggagttttcaatttgttaatttttcagattagcttgaaaaaaggattagcttgaaaatacaattctataatcatacaatttcaaagcatagaaaaaaaattgttcaaaaaataagaaaagaaaattaagcataattctatattggctgctacattgcaatatacgtacgtacagtcataaaaatatgcacatggatgaactattacaattagaacagaagaaaagtaaatgataaagcttcttactcttgactaactcttattaagtactgttgattaatttgaaattttcaaatcaaaatacactataaatagctgagtacatgaaacgagttttccatcaattaaagctaactccatctcgtaatttatataattatatagtgatcgtttatatacatatatatcaccaaatcgtgatttcaaa

SEQ ID NO: 207 - DNA, 1500 bp, Artificial Sequence
  Description of Artificial Sequence: Synthetic polynucleotide
aatgtttacaattttaacatgtcgattattttcaattactaattttttgaaaaaaaaaatgtgtaaagttaaatataaaaatacataagtcaatatttatattttgatatattattaaaataatatatttactaaaatttaatacaaaattatatatatacaaacatatttaaaaatttgtttatattttaaataaacaacatatatgcatgtttattaaatatttaattattattaatgtttataatactagtattgatctaatatgtttattatgataatattttaatagaatcaatataatttgttgattaaaagttcataaataagtttaaaaataaaacatttatgtttattttgttttatgaaacaaagctataaacaaatgtgaaattatgtataaacattatatttatattttatattgataatgtttataaattattaatctaatatatttaatatatagttttataaataaagtatgtatatttattttattttacttttttttgttgtaagaaaaaatatgtatgtttattgtttatttatataagacttaggaaaaattaattacctcatatagattgtacagaaaattaaaattatgtgtctctaatatagaatgtataattaaatgtaaataaattattttgtattatatagtataataaaattatataatgtatacaaaattataaatttctcatatcttttcttctaatttttatttatttatttttttaatgtcaatatgtataaagtgttggactccaatataaacacttaaagttaaacttaaattgagtttaattaattcaaattttttgtcaagttgtattttttaagtagtttgtttgtgcttgtggcttgttataaaacatgctatgccctaattttgtatacataacactaaggtggcatttggttgaaagaaatgaaaacatatataaaaataaaaatgaaataaaataaaatttaaaatgtataaaaaaatcattagtttcttttaatgttatattaacatgattttttattctattttaaaatagaatagtcattccactaaaatagtgtaaaggacattccattagaatgatattctaatactttaaaatgtaaccaaataaataaataaaataaaaataatttctttttcattctattccatttcattactcattttcattccattctatttcatttaacaaaaatgataaatgaacatttttgttatcttgtagtagtacaaactacaaataatagaaaaatgaaactttaatataaggaggagacaaagtctattatttaccttggtgatcaagttttatatacaactttgaaataagtactttctttctctctcttattaacataatcctacttgagttcccacttgcatttaccttaatataatactatgtcaaccatgtgtataattagatctaacatctacttcaaatctaaagaacttatttaccaactaatcaaaatcaaaat

SEQ ID NO: 208 - DNA, 1500 bp, Artificial Sequence
  Description of Artificial Sequence: Synthetic polynucleotide
gtagtacataaatttatagctgatgataagtctcattctcagtcgaggaatatctactgtgttttggatcaactgaaaagggagcttaaaagttcatccatagctcaattttcaaccatgtatttttagtttataatagtaaagattattcagtcccgtatagagagaaaacaaatgacaaatcatatgattcagcagcaaaaaatggactttttacaactcaaaataaaacagaaatatcttactataatataatacatagggataatgtacgttgatcggtttatgttaagtacagttcgtctaattaaaaaaaaaaaaaaacagaaaccaatccaataaaattagtcgagttagtcaggttaatccgtccaaatcgatcattaatatattttttttacattcaattgctatattttaattagatgtaataacgagacaaatagatatatatttataaattacacttacagttcaattcaacacataaaagaaacatattaattttaactttatatgttttaaaaattcatataaagtatatgatatatataaatatgtatatacataaaaacccttttgattgtgttggttggattagtaagagttgaatagtggggttgatattattttcaatccacccaatataaagatcagacagattatatttttatcgaatttttcgatttgtattttttgtcagcttatctcaatttaatttaagcaagttattcagattaggcggtttaaaaaaatgaaataatagcatgaaagttttcagtcataacattaaaaaaaaaaatgtcattttgttatgatgagtggctatgaactgcagccagtttttgatggtattcatatgcaattttaatggctttcttcagcttaatgatttaattagtagataagagattcttgaatctagtactcatgatgtatttgatatccatagtgaccattgaagattgaaacagttttaacttggcttctctctcatattgttcaagcattatttttggaacatgacgaaagttgttcaggaacccatgttgtccacatcctgaatttccaagcttaagagaacaaaaaatccaaataggcattcatcactaacttcacagacatatgtcacatatctctacatttaatcaaaactgttgtatgctgatgtcttcaattcacaagtggcaaaaatgtaaggtgggaccccaaaaaatttccactagagccaaactctaaatagggaaaactctacaccacctcgtagtacccaccgaaatcccataccactcatcttttagaaaagaaaaaaaccacacttgatctcacaacaaatataaagctgacttcttttgttgtttttagaaaccatttccaccattttcctaataaactacttgatactaaaataatcaaaataagaataaaggaaaggaaaggaaataatactacaacactgcaattattttctttctcctgttaaccaagtttgaggttagg
